United States Patent Application Publication US 2024/0065297 A1 - sequence listing, part 4

SEQ ID NO: 7 - DNA, 1154322 bp, Pichia kluyveri
  >Nicaragua_Y298_000004F_chromosome
acttcactatacccccctgcgacctacttcactataccccccctgcgacctacttcactataccccccctgcgacctacttcactatacccccctgcgacctacttcactataccccccctgcgacctacttcactataccccccctgcgacctacttcactataccccccctgcgacctacttcactatacccccctgcgacctacttcactataccccccctgcgacctacttcactataccccccagcgacctacttcactatacccccctgcgacctacttcactataccccccctgcgacctacttcactataccccccctgcgacctacttcactataccccccctgcgacctacttcactataccccccctgcgacctacttcactataccccccctgcgacctacttcactatacccccctgcgacctacttcactataccccccctgcgacctacttcacttcactataccccccctgcgacctacttcactataccccccctgcgacctacttcactataccccccctgcgacctacttcactataccccccctgcgacctacttcactatacccccctgcgacctacttcactataccccccctgcgacctacttcactatacttcactataccccccctgcgacctacttcactataccccccctacttcactacttcactataccccccctgcgatctacttcactataccccccctgcgacctacttcactacttcactataccccccctgcgacctacttcactataccccccctaaacgaagataatgaaactgaattagaatattatactgctgatgagatggaagaagaagaaattatgaacgaaaagaatgaagaaagtactagattaaatttaaacatcatcactacagaaaggcaattaaaaagaaatgtgaacaataaagaaaatgcaatattaatgggatatatttactcaattgaaaatgataatgaagaaaaagaagaagaaaacggtattgaaaagccttatgccaatactgaagaattaagaaataaattatacaatgagttctcgaacacaattaccaatgatcctccaatgcatttgcctccgaaaaggaatttaactcatagaattatattgattgaaccaaataaaaatgtgtatcgaaaacaatacaaattgagtcatcaggaaaagattgaattaaataaacaagttgaagcactgctagcccaaggatttgtcaggccatccgccagtccttttaatagccctgtcttgtttgtaaaaaagaaagatggcacgatgaggttgtgtattgactatagaattttaaataacaatacagttaaagataagtttccaatccctagaattgatgagattatttcaaaatttggtaaagccaaagtgttttcaaaattagatttgatgtctggatatttccaagttagaattaatgatgaagatatggaaaaaactgcattttctacagaatttggtcattttgaatgggttgttatgccctttggtttaaccaatgctccgagtacatttcaaaggatgatgaatgaagtattgggtccatatttaggaaagtttgttcaagtttatttagatgacattattatttattctccatctatcgaaacacattatcaacatttacgagaagttttaaatactctgaaacaaaataaattagttgctaaaagaaagaaatgttcactattctatcaaagtttacaatttttagggcatgttatatcaaataaaggtgtccacgtagatcccactaaaatagataaaattaatgaatggccaattccaacaactgtgaaagaagctcaatcatttatcggtctatctggttattatagaagatttattgctaattattcaaagattgccgcacctatattcaattttattactggtaaaagtaaatgggaaaaaccacaacaagatgcttttgatgaattgaaaagaagtctaactaatgctcctgtattggtacatcctatctgggatgaaggttataaatttgttgttcattctgatgcctgtggtagtgctctaggttatgttttagaacaagttgatcctgatggtaaaactcgtggtgtcattgcttatggttcaaagaagttagttggttcccaattaaattactcaatttatgatcgtgaatttatggctgttgttgaagcattgcaaacatggagatattatttactcaatagacattttattttgaaaactgatcacaaatcacttatttatttaaagaatcaaaatttaattgatagtacaagagttgctagatggttagattatttatcccaatatgatttttcaattgaatatattcaaggtaaaaagaattcagttgctgatgcattatcaagatatccatataaggtttctgctaataatttatttatcacacaagttgaatctgttgttgctcctaatgaagaactcaaggaagaaattataaaaggatattttaaagatgaagaattaagtgaaatttatgatgtattacaaaataatttacctgttcctaaaacaatcaacaattatattaaacactatagattgcatgataaattactttattttactactgttccaggtgatatttcaaatagaattgcaattcctaataattcagaactcattagaaaattaattaaaaatgctcatgatttaccttctgctggtcattttggattttataaaacttatgaaagattacatggtatgttttattggcctcatatgttgaagtctgtaaagaatttttgtcaaagatgtttattatgtcaacaatcaaaagctgaaactcatggtaagaaaggtttattttctccactacctattccacctggtagatggactgatattacattagattttattactggtattcctccttctagaagtgggtatgatatgattttagttgttgttgatagattttcaaaaatggctcattttattccaactgttaaaacattaaatggtattggttgtgcaaggttattggtagataattgttttaaatatcatggtattccaagaagaatggtctcagataaagatattagatttacaagtgaattttggcatactgttaataagttatttggtacttctgttttattttcaactactaatcatcctcaaactgatggtcaaactgaaagaacaaatcgtatattaaatgaattattaagaaattatacaaataatgatatatttgaatgggacaaatggttatctgttgctgaatttgcttataatagttctcatcaattatctattggtatgagtccatttgaattatgttatggttatcttcctgatagtccttcaacaatgcaaggttattctattcatgatttaagatatgatgataaggctgctagatttgcaaaaagaatgaaattaattattaaacaagttcaagataatttagttagatcacaacatcaacaagaagttcatcataataagcacagaagtgaaataaattttaaagttggtgattggatcttattacataaagatgctcatggtcatgattcgaaatattataaaattcaacctgtttattatggtccatttaaattagttaaacaaattggttcaaatgcatttgaagtagatctcccaagtatgaataaaaaagatagagttatgaatgtgaaatggtttagaaagtttttacaagctgatagtggttttcctaaggttccacctagaactttagctgaagctgaatcaagattacatgaaataattggtattgctggtatagatgaaacaaataattcacttgatgtttattggagagattgtgatccatgtcactcatcttctattccagttgaactttttacaaaattacctgaatcagaacaagctacattatggaatcgtgcaagagctttagatccaaagaatcatccttcagaaattcaaaataattctcaacatgaaaatttaaattttataacttcgaggacgaagtttcctgggaagcgaggtaatgtaaatgaacgacttcgccggctcccctctttcctaattaggaaatattaactcttcaacttcgcaagagtttcctcttttgttaattggttgtaaccaaccaatcagaattatcctaattcattcttgacttcgagaatgccaacctctcttaatacttatcctctaaattacaattattaattatttacttattattatacttatttcttttactttattttatattattttatattttattttaacaagtagttccttattaaatcaccggccgttcattctcagttttttcaacgggtgccatcatttacaaactttcctttttaatcacgtgatttacttaccaagatactgaaatagaaaaaagttgatttgcaaaccatctttgttgggttacttgatttaaaatgataaaattatgctaattacaataaattatccaaattacacacaagaatgttaaattataatttaaattattattcccaagtctgcaaaatgtgaaacttgtaatgtttttttaccatgcatgttttagaatcaatctgaatgaattagaaatagttaataaattaaagaacatgattgtttcagtatcatcaaaaaaatatgaattcatgctacatatataatattaaaattaatcatatcttacaacaatcaaggttaataaaaaaacaaaattaatactgaattcagaaccacaaaacaatttataaatgataaacattttttattctaatatgttagttcttattcaagttaagaaagataaaaaaggttaaagaaaaatttatgagatataatttaaaaaatattgaattaatgaagcataaatagaatatgcgtaaaagtaatcattctgtctgaaattgtttgttttaatgaggtgaatgaatttatcaaaataagactttagaaaaggattagaaaataaattattaaaactaattatcataaatattgaaagataaaaatatatgaagctggtttaacataaataatgtggccgtatgactacttacaattaaactaaattctagctttttaacattatataaaataaaaataaataaaaatacctgatatgatttaaaataacaaaactggttgataaaattcaagttaaatacataaatacaaataagctcttttatttgtactcacctaaaatataaatactttataatattttatgttcaatctttttttaaatacattactaattcttacaaaaatacaaatttataaaaaaagttcacttaaacaataccatgacagagagctctataaccatcatttggtttcaaacataatatcatataaatactgaacaactgacatttttttaattgctccaactcctttggaacattcaacttgacaccatccaaataccaactaaagagaatcaattttgcagctttgaaaattttaacactagtacatttatcacagcagccaaaacatttcatacaaatatcacttggaatatacaaaggtgtaaaataaactggatctttaacaaatttttgaatttcagtatatttatccacatattcattttcccatttaatacatctcaatcttttagcatgaacattataatactccttccacttctcatcactttttggattgcccactatttgtttatggtactttatcacttgaattgaaagcattttaaactctttcaagtacccacaagcccttacaaacacatcgtttccacatctaacaacccttctcttgaatccaataatgtctctttttccaaaaaccaataaaacaaaatcagcacaaaaattaacaattgttttttcatcaggaacaaaaccagccaaatgaacaagttctgcaaaactgcaaataaacattggatccttgcagacatgttcaatcaacaaatactcatataacctataatttttactattgatattattgagtactggatatttgtcgtataaagagttaacaccaatcaaatgaccccttgtatcacgaatatcatcatccaaaatagaattgatattaatattaaaatcagaatgaaaataattgaatgttttaggtaaagaatttctaaaccttttctcaacctcatcatttaaccaacttcccgctaatttcaattcctcataatttggattaccatctaaaacccgtgatataccaactacatctctctcatcattaactctacgacgttttgcatcttcagaaacattgtcaccaccattaccatcacaactaactcttttatttgattccacattgacactttcttcttctactcttacttcagcttcaaaatcattatttggactaacctcatctgccactgaaaattgaataacatcaacatttccatctactccacgattttcaacaacattattctcaacaacatgattttcaacaaaataattctcaactacttgatcttcaacaacattatcttcaactacataatcatcaacaacattatcctcaacaacattatcctcaacaagaacatcttcttttctttgttgatcaattgcttgataaacactataaaaattattgttccttgttctaataacttcatcatttgctacaacttcatttccttcactttcatcatcatcccctttcacatcctcaatataaccttgaaaattaacatctttcaaacagttcataattcttcttaacaaaacatcttcaacagggcattcgcagcaactttcgtgttctgaaccttcaatgttataaaaactcaacatttcatctgtgaaacaatgattttttttatcaataaacatacacacacctttgccacgaattctacccataccttggataaatgttacaacatctggaatatagttatagaaaataactaattgaacatctgctgaatcaataccattggaaataagttttgtaccaaataaaactcttttattcgaatcacgaacaaaagaatctgtaacagcagccttatctggagaattaccatgaactttcaatacaacttctttttcatcaaaattatcataacatttttcaacatcagcaatgacaccacaaataacaacaactttaccttttctagaatgagctaaaaatcttttaatttgaacattcaaaaaagaattcagatgatatctatcagatgttttactgataatttgaatacgaccactatgtgggagactagtaataaaattttcatacctaacatcataatgaatttttagttttgtatgtatcatctcacacatttgttgatccattgtagccgacatcataataatcctttcaaatttatttaaatatgcattaggtaaaaccacattaatgctttctctaaatgtatcttctaaaagaatagtatgagcttcatcaataaccagcaaacccagataagatttatccatcaaaaaggttgtttccttgacattttcatatgtacccaagtaaacatcgtagtttcgatcattgttgacatttcccatattaccgactttgaaacccagatcttgaagccttgacatcatatcagcccttaatgttgcatatggaacaagaattgcatttattagatgaggatactttttatttattgccttcaacaaacaagtaaacatcattgttttcccaaatcctgtagcagcttgaaaactgtaagcaccaacattatttgcaatgaaactcatcaaactattttgaagaggtcttaattgaatgttaggatataagtctttcatggcttccaacatatccaaaattccaatttcactgttaacattgagtggaacaaccctattctcttttcttggtttacgtgtttttgtaaagcctagattttgattcaacctatgcataatattgaaagaaatatggaaagcttgacttctttcaatattagacacattctccaccacagcatagttttcaacatgggtaatttgattatgaccaaattcagaagcaataaccttatgatgagataaaaaagcatcattagcttcctgaagaccagtttgatttttgaaaaaaacaaaagcctgtcttagactaggaaccctgaatttttcacgattgtctccaacaatcaacaaatcttttaaatattgagtaatcattctaccaacacaaaatcccttcttcttggaatgtgcaacacaaaagacatacctatttaaacactcttttgcattttccaaatgagcagcatttctgatatcttccaaactatcatcgaaatcgatttccacatcatttaaaatatgagtaggatcattaattgatggatccaaacgcaaatttttcattgtatcatgtttcaatggatataatgccaaggtaaagtgaatgaaatatttcgtaacttgatcattaacaatcaacactctaggttctagctttttattcttggagtaggcagaaacaatatgtaaatatgatttaccatcatcaggttgatacaacttcataacagtaccattattatccatggtaaaatatgccatttcaaatagtctgtagctaccaccagcagagaaatgcagcatcaacaacattgcagaagacattgctttgataatatcataaattttgtctaaatttggattttcagctgttttgacaggtttatatcttttaagataaacagtatttttatcaaaacagttgtaaaaaggttcgtttaatttttgatacttagaaataccaagacgagaaacagattcaacagtatctagatcaataccaattgcagccaagtctttcaaacctttttcataaactctaaaaaaattatcgtaacaacttttcatcctttctttgctaaatgagataccttcaattgatatttcaccatcatcatcaatttgaatttctgtttgagtggtgaagtcagtaactttgaaaactccatgataaacattcttcatttgcttaaaatgatcaacatcatcatcaataaacaaagcagtaaattcaggaggaatttcattatcaggagtaccaggtggattaaaaataaacaaatacttcatcataaacttaacactatccataaccttcaaacaataattatctttttcaatacaatgttctttaatattaatcatagaagcttttattggtagtgtgaacaaatttgcatttgggtgtattaaaatgtcccataaaaactctctaaatttaacaattttagcttcaagcaatttatcatcaattgcaccatcttcatcataaatattgttaacgttttcccttaaactaacggatctatcaacaaattctttaggaatactttgtctagtttcaaatttatcaaaattgagtaagtaatagtaaacttttttcatgtaagcagaataagtataaaatgtggttaatttatgataacctaaaacagtttgagatttattaacatcatttggattttggggtaattgaatcaaagaacacttctctttatatttccagaagcattttttagtaatttcaagaatatcaattctatattcattcaaatcattggagaattcatagttttccatttctttactaaagctggtaatgttgtacatagtttctagagtatgtatataatcagtggaaacctttttggtttcaatagaataaacagaagcaacaggacctgcatttttagcaacagtgtcttccttggaacataaataaatttgttttctatctttattacgaatagtgtagacatttctcaattctgcaccactccttttttccttagaggcaaaaagattaccatcttcatcatgaaaaacatatttttgaatacttttaaccttgtaatgaatcaaattggaacaatcatagtagacaacagagccacttggttttgaaaagatttcatcataaaacaaacgacagtgatacatttcatcatcagtagcatctttaacagactcagcatgagaaatgaatttatttttcaaattaataacaacattattagaaataacacgtttacctttcaaacaaataagatctttaaaaggtggaatatcaacagactcgttatcagagtcactaaaattataattataaattgcttcataattatggttatcattcatattattatcaatggtttcagacatgtttttttacagaaagaagaagagaaagaagtattcaaaaagaaaacatatttcaatgtttacatgtagaataaacaatacaaactgtatatatacgcgtaaaataattttcaatagtgaaaattggcgttcaacatgagacaattaattttaacaacactttttctttctgttaatttggattaatctaccactggtaatgctaattgaaaggccactagaattataatgaaataaaaagcatcaaaccatcaactactgaactaaatcaaagataaatattgaaaaatgagcctgttacaaaatggccatattaacaatgctaactttgacctttaataaatacaccatttctaaatcaaatcaacttctacttgctgcattgaaatcagaaacttttaattaactaaacatgataaactgttgctaaatctggacatgataatatttaattgctgaattgtcatacgaaatttcaaaatagaacttcaacttaacttcatcagtttggaatatcaattgaagtggtttatcaaatcttcattagaacttgcaaatgataccacatccaactaccacggatttaaaatcattagtttaactattaaaaagtcaattagaaaattttacatttttattttatgaattggcataacttcattattactgggtcttttgaaatgaaactaaatatacaactatcaaaaagatgtaatagatcaatgagtgcttaaacttggttaaaaagatgtactgttgatatgttttttaaattaccatactaatttttgaaaaatgaaagtaaaataactttatcatttttaaatgttgatctaaatgacttacttatttgcaattaccaacacttacaattacaaaatctaattatcacaaacataaaatcattagaataactattaaaaaaaaaattttaaaaatttcaaaaaatcaaattacaaagtgacataactttatcaataaaaagtctttctaaatgaattttaatacataatgatcagaaaatctatacaaatcaacgagtgttttaactgagctaaacggatgtgtggttgataagtcgatacagctgccatactaattcacaaaatttaaaagtggaataatcttatcatttttcaatatttaacaaaatggtttacatattacttatcagaacatgcaaatcatacaatagcaaattactttgaagttaaaatcattgtttctaaccttgaatatcaaattacaaaaaatggagaaaattaattttgaaatgtcataactttttcaataggtgaaattttctaaagaaacctggcttcacatattggaaatggtcaaacaaacaacatataaacgtaccagatgataagaaggaaatcaacaaaaaaattgtcaaattgacatactaatttactatggggagaaacaagctttcaataatgatatcaataaaaacaatttgaacattcaattttgatatccataatctccagtgccctttctataagaaaccaactaactagaagtatatatcgtgtgtataagccataaacaacatccattaaaactgttaatttaacactaatttactatggtaagaattactatgtagaaatttcttaatagtgagaattcatgtaggcaatttatttagtgattttatcaacacttctttttcctttcggtctctttaaactgacactattagacataaactagtgataaatagactgattacaccataagaaacatcaaatacggcaaccctgatatagtttgaagcttaaagacgaaaaacgaaagacttagataattctcatattaattgtttcaacttcaaactgttctaacttcatcagttctcaatttttttcaactgaacttacttttgtgaatttagcatgtcccaaatgacaaaccttggtatataaaatactaaaaaaaaaataaaacaatctaactgtcaaattgccatactaaattatgaaaaataagaaggactttattcattcagttttgaatatcaattgatttggtttacggatttgcaataatcagaacgtactaatacaacattaaactaccctgtttttaaaatcattaaaacaacttttaaagagctaattttaaaattttaaaaaaatagtttataaagtgatattaatatatcaatactgtgtcttttgaaataaaacttaataaacaactattattaattacaaacaaacaaacaaatatgtgtatcaaatgagtcatataaacgtctgtttaatgtaatgatagattccccataataaatttcagaaatggaaagagaaattaacacattagtttgcaatattatttaacacagcttactaattcttctttattacacactaatcatacaacatttaatcaacctgagtttaaaatcatcaatacaactatcaaaaagttaattagaaaattgtgacaaattgaacttcgaaacatcataactttaccaatataacatcttttttaataataattactactaaatgttatgaatgactagataaacaaacgagaacagttgcaggtcattacaaagacattgataatttaattgatttattgaagtgagttgaagatttgaactttaaaaaaaataatatggacaaagtaattacatattctgattcttcaatacacattgtataataagcttgctagctagaactgtatatcctgtatataacccctaaataacattcattaaaactgttaatttaccatactaaatttactatgtgaaaaattactatagtgaggaatataagacaacatggggtatgtcatatattaagatgttttgtctactattggtaatatatcgttacatgaaggctatttaaatgataataggcatatatatgatactaattgtagtgaatattaatattcaagtcaaagaatagtaaaaagagcttgattgaaggagatatagcaacattattaaaatgacgagccacctaaaaagggaaaaacagggattttagagaatgacaaagtatcaattgataaactactttgtaataagtttgtaattacttttaaaaaattaaatatcatcactaaaggtccatttgtgatatagattaacgatttaaaattatagttacaataaataagccattaattgaaaagaaagttgatttaacatactaaattactacagtgaaacaaacacaaaaatctaatttttaaataaacaatttcaacaatataattacatattcatcctctccaatacaagtagtatatgaatgcactttgttcaagtttaaaagctttaatataacacatataattgtcacttgaaagaaccaatttaacaataatttactgtagtaagaattactatgtagtattattgaaaactgatggtttactagtttattaataactgtgattgatgtccatataatggaaatgatttaaacatactgtatgaaatcagttttaactgaatttctttttactagatcataaatctatgctaaaatgacatattgtttgggcattattgtcttaaacctttcatcattattatacattacatttaaaaagaaaacagaataaaaaattaataatattttgataagatttcttggataggattttaaacctttaacgaagaatatagatagataatcaactgttaataatgaactcttttatatcttaacctttttatataatttactgtaatataaatattatgtatcgtataatgattaaaatcctgaagccttttgaataaaaaacatttaaagtcatttaaaaacaatttaaatcatttattcattcacagaaaattaaaataaaataacccaataggaactaaaacgttatcaacataacgaaatcaatgtttgtaatgcaaaatgttgctaagaacaaaatcataaatattcactatacaagaccatgacacaagcatctataaccatcacctggtgtcaaacatagaatcagataaatgctgtataacttgcacttcttcaactgaaacaactcttctggaactcccttcaattcctttttgtccaaatacatttgaaaaactgtcaacttagcactcttcgcaatcctttcgaatctacatccttggcacaaaccaaaacaattaatacaagttccaacacaaacgtataatggtgttgagtaaattggttctccagtaaacatttgaacgtttggataactttttttatatctgcttccccaatgatatgatttcaatttattagctttacctttataatatctattccacctatgattactttttggagaattgattatttttctacggtatttaatcaaattaacggaaagtattttaaattcttttaaataaccacaggctctctttgatggatgcaaccctatgtttttcatctttccctttataccactcggccctacattttcaaagattgacattaaaaattcagcacagaaccaaacaatatttttttcatctggcacaaattctgctaaatgtacaagttcagcaaaagaacaaatgaacattggatctttaaagacatgttcaatcagcaaataatcatatagtttatagttttcactcttgatatctttcaatattgggaacttctcatataaattttcaagaccaatcaatctgtttcttacatcaccaatatcttcatctaaaattttattaatatcaattgcaaggttgttatcaaaagactccaattgttttggtaatacgcttctaaaatgcgattcaacttcggcatttgtaaaggtttccaataagttcaactcatgaaaattcaaatttttatttaaagattctaacaaatcgttctttaaaataggtttaattccaatacttgaaaaactaccagctttatcaatcaaagtttttgaactatcattcccatttaattcattactggaatttaatgcaggcatcatattttcatcaacatcttcaatcttacgacgtttagatatgtctactgattcactaaataaattatcattttgttttccagacagtttatcatcactttcaacatctgaaaactttcttttattagtttctatttcatcttcaacatatccaaatgaaaatggttcagtaattacctggttaagttttttaatgaatttatcgtcaataaaatgattacaacagttttgatgacctttaggggtaatattgtaaaacttttcaacttctgatgtacgacatataagattttcatcaaatatcaatatcattcctttgaacttaataaaatttaaaatttgtatgaaaatttcaatcttaggattatactcatataatataacaacttgtatattaggtatttcaaaatcattcacatcatattctgttgtaatcaaaacacgttttttaggatcattttgaaatttattcgtgatagaagtttcatcaatcgaatcttcaaataataaaagagaacaatctgaattaactgatgaattgaaattatgatataactcatgcagtttatctttattatcactaataacaacacatttccctcttgaatgagacaaaaatttaattagtatatttgttatttcatcttctatattattattattattatcattatcataaatcatgttcttaatctgtattctatttttgtatgggatttcattatatattgaccttatcttaatttcattatttaatcttaagactttgcgtaaactttgtgctgtatctgcattcattatatgagacatcatcaatattcttgaaaatctattaaaattgaattctatggatgattctctaatgtttggcttatctttttgtattaattgatgacaatcttgtaaaaacaataaaccaggttttgaatcttttagtaaagtattaagatctgtatccgattgataagaacctatataaacatctgttgaaggtataagtccattattcccttcaatatcaccaacagtgaatccatgtgatattaacattgatttgaaattatgttttgaagttgtgtaaggaagtaaaattatattaattaaatcaggggattgtttattcatagctttcaataatgataagacaatgatcatatcgtttccaaatgatgttgattgaatataatactcaccatcattatttgcaatagctttaagtagattaatttccatatcgtttaatgataaatttgaaaaaagtttatctttttcttccattgatatattaaaatatggaatattaattttatgacatgattgatcatatatagttttagctaatcctttaagttgaggtacataataatcaaaaaatggcaacatataacttctttcatctctccaaagagtttttaaataaacattttcatcaataatgtatattttatcacctttttcatttataaaagagaacatttcaaaaagttttgaagtgggatgtgttgaatcaagtttcaaatatttgtctccgcttacaacattctctttaacagttttgataccatattcagttaataaattacatctatgaattaacactctatcactatagttattagttatttcatcacagaatgacttagcagttttaagattagttaaattttgaggtagtataggatcatatggattcatacaaactttatttgtcaaatccacagctatatagtccaagacggcatatctaggttcttcatctatagtcatctctgtagaaactcaaagaaaaagaaagaaccggaaagaaacttgtgattatttccgttgccacttgaaaaacatgttgtcaattttaatgaggcgtttgatatcttttcttttcttttctttttacttctttcttctttctttcttttgtagatcaatagacaatgtctgcaactatcaatcgttcattaacaactattaaaacagaattagaattcttatctgaatccggtgtcataactgaatctctatgtgatcatataatctcattattaccagatcgttatgtcaaagggatgccaatttccgatctcaaagattcctcaaatacaatttcaaatacaaataccaaaccattgattcaattagatgatagtgatagagaattcaataatgagaaacaagtaagagctccaccaccttctgctccaattaaggcaccacctgttgaattatatgaagcattatataattttacacctcaacaaagtgatgatttagaattgagaactggtgataaagttattgttacacaaaaattatcaaatgcttggtggaaaggttctgttaatgggaaaagtggtgtctttcctgctaattatgttacaaaatatgatggttcatcaacttcattagtagaaaatgaaagagattttgattcagtacctcaacaatcatcatctcctgctccttcttattactcacaacaaccaccacaacaatactcacaacctccacagcaacaacaaccaccatattatcaacaacaacccgctcctgctccttatatgccatatcaatcaccagcagtggttcaacaagctccaattattcaagcacaacctcaacaagtagtttatcaacaacaacctcaacaacaatcatcatttagtaagtttggttcaaaattaggtgatgcagcaatctttggtgcaggtgcaacgataggttctgatttagttaatgcaattttttaattttaattattagttcatttatataagttatttcataagttcttttacaaaagggtatactttctttcatcaataaacaacatatcataatatataatatatacacatataaataataaaataaatcttaaatcataatgtatatctgaataaaacattttccttatcagttaaatcagcaaactcataattatcaaaatttaaagcatctaatttaccttcactttgcaatttatcccttctcttattttcagcccaataattataataaatccatgaaataagtacacttgaaacggccaatgaaacaacaattgcaatttgtccacctctatattcaggtgcttgatcatcaataaaagtttgaggaccaattaaattaccaacagaataaccaattaaatataatgcattaacagtaattttttttgtatgacctgcaacatttgatgtaaaacatgataaacaacaaatcattccaactggacataaattatataaataataacctgcaattcttgcctttggactttgctttgcgaatgctaacatacaagaagcaattaaactgaaaaaaacaacaccagttgcaacacctagtttatgtttaaaatatttttgtgaccaacttaataaaatacaacctgcaaatgtaattgcaccagtaattaaattcattaataatgattgagtttctgaatatccaaaagtatcattaaataaaattgctgcaaagttagttaatgaaccatttggaatttgaaatgcaattgaaaagaaaaagaaaatccatgtattaatatctaaaattgcttctttaaattggtgatatttaaaatgtatattaccaaaaccttgttgattagttttaattcttaaaacaacttctttcttttcttgtgtgtttaaaaaccatgctttaactggaatatctggaatatggatgataaaggtaaatccaatagcaattgtcatacaacccataataataaataaaactttccatgattccattgaataagaatctggtctaattgctaaaccataagaaattgaactacctaagataacaccaataccattaaaagagaaccaaattgcagttcttaaaaattgttcttcagctttataccattgacctgttaagataaccatggctggagtaacagctgattcaaaaatacctaataaagttcttaaagtaataaaacctgcataattagcaggagttgcatgtaaacaaataattaaaccccaaagaataatattaattgaaacaaattttgaaactgggaatctttgtaatgctaaactcattgggaattcaaatataagataacctaaataaaatgctgaaccagtccaagaatattgattaccatgcatattataataatttctcaaccccataattgctgcaaaacttgttgaaactttatccatatattgaattgcatataagaaagaaaccaagggtagtaaaaataaatcaattttccaaagtaatttacgttcaatttcaggagttaaagcaatttgatcatcatgttctgcatcaatagcataagccattgcttgatcgacatcaccagtaacatcaacaacattaccatcaatggatttaatatgagttaaaacatcttcattgccgatattttccttattgaatgaaactatatcagaaccatcattatcatttctgatgtgagtattttcaattgaattgttagacgattttgaactcatttcggtcttttacttcttgtagaaaaaagagaaagtagtattaggttgtgtgttatattataaatttatgggggatgtatattctttttatataacacaatagccacaatttgaagaaataaatgagtcaagttgtggttgataacacattgccgtgtattttatgataaatattctgtttaaataaaataaacttcattaattttccaagatgaaaagttcatcaacggttttctgtcagtgttaaatagtaatgcccatcgattttatgtcataaagaaggaaaatctgccataacgccacttgaaatttctttttcagggtgtagcgctaatccttttcgcaatttcacgtgatctgctgtcacgtgcttttatgacatgccatttgttgtgtttgagggctcatttgccatttgaagtatctttttgtgttgtattgataatattgttgatataattaggttataatggtactatatctactctatatgtatagtataagtgttagtaacatgtttttgtgtaaataaatagcttttaagaaacaaaaaaagacttcaacttttaatatttaattaatggtagtctccgaatactgtaatttacctaataaatgaccaaattatcacccaaataacttctagaaaacatctacaggttatattacactgaaatacatctcaatacaatcaaaatacatcttccttacctatcattacactttaattggtcatcaaatggtaaaagaaaatacaatcactcaatctacaacatgagaaattcaaattttttttttaatttttcctcaattaagctaactaattttgcattttaccattaaattccttatcttgatttcatctttaatttatctttgaaatagtattctcaatagatataactgtcaaatgactaagaaagaatataattttaaaccaattaatgtcaaatatgttggtagaactcatttagcatgtcttaattgtcgtgttcaaaaaattaaatgttcaggtggtatgtaattagatttaaaacaattctttttaatcagaaattaatatactaacattatcattatcattattattataggaccttctgcatgtaaaaattgtgtttcctcaaataaggaatgtaaatatcctccaagagagaaaaaagtaactcttttagaatctcaattgaataaacttaaagaaagaataatatttcttgaaaatcaattagaaaatgataaattaagacaaaatagtataaataataataatagtgataacgataacgatactaatactgataataataataataataataatgaaattactgacaataacaccgataataatacaatcactacatctaatgatgatactaaagatgatgaaataactgattaccatagcataccctttgattcaacttcaaataattcaagttatagtcattattttggtacttcatcaggccaagtttttgattctgaattaaaatctcatctatttgaaataactcaagatgctgataaattatcaccaaattcttcaccttcaacacaacgtcgacatttttttaaagatccaacattagaattctcattctctggtgttgtaatgttacctgataaagaatatgcattatcattggttgaaaaagttatcaaatttttaagtcatgaatattatttatatgatgctgaattattttataaacaaattgatgaagcttatgaaaaattaagggataaaaaacctttatggatatgttattttttaatgactttagcagtcggtgaacaatatttaagtcattctccaaatggtgaaataccaggtatgggattttatattgctgcaatgagactatataaatcaagttatgaggaaccaacattagaatttgttcaattattactattaattgcattttatttacaaggtttaaatagtgcaaatgctgcattctcattttatggtttagcaatgagatctgcattaattcaaggtttacatagaaatataaaatactttaccgccaattgagagaggaaaaacgtaaaagattatggtggactgtattcattatggataatatatggtgttctaatttaggtcatccaattcatgttcatattgaagatgttgatgttgattatccctcaagaaaattatattgatttgaatgatgattttaatatcgaattaatgcaatataatgttaaacttgcaactatacttggatcagttatgaaagatgtttattgtccaactaagggtaatccttcaattcaaagttaagaaagttttagattgtgttgatagattagatgaattaagaaatatattaccaacaagagttaaaaataatttaatcctttcagataatagatcaactgctaatttatatttacgattaaatcaatatacaattgttacaactagaccattattattatcattatttaaaggtcatgttcaaccgacagatccaattaaaaaagttgtttcaagatgtgttaatgctgcaatttcttcaatcgacattttaacaaatttgaaaaataatgactggttatcagcatttggattttgggatgcacaattttgtttttctgcattaataattttaactatttgtagttttgcaggtaatgtttatacacaaactgaagctggtaggaaaattaataagtatatgaaagatgcaggaaattttacagccttagataatgaacataaacttattgaattagatgaattattatctaaaattccaacttattctgcaagttttagaaatagagaatctgaagaagcaaatgataccccatctgaatatgaaaataatgacaataaaaatgatcacaatgaagttattgaaactcaaaataaaaatcaaaatcaaagtgaaccaaatttaaataaagatccgacttcaactacaatgaatcctcaaagatcaagtcataattcacattttgaaaatgaaaatagaagaaacgttgatcaacaagtgaataaaataagtcctccaaatagtatggcacttgattctgaattacaaatgagaaactctattgcatctaatggaaaacaaaacattccaatttcacaattgctaataccttcaaccacaccagataacatatcaccacaaaataaaggacaacaacaattttttaataagttttctcctatgggtaataattcaaactatactaatcatccaacggataatagtttcaatacattctttaatgatatcaattcaggtccaattggtgattttacagcattccgtaataatgtttcgccagatacttggaatgaattaactacaaatttacaattttgggatccagctaatagttaggtgattatatccttgtctttacttataattgttatatatcctatttgtattatacctttaattttgtttagtattgattatctacaaaattatcattactataaaatatgaaatttacatagaaaatttgatcttcggaaaactcaatgaggtttcccgaattttcacatatttttaaaaaacattatcaaacgatctttatcagctatattacaatcaacatacaccattaataaatatgattcaatgaatataatatatctcaaagtactggcatgatatttcattatagaaccactttttaaagtacttgattaatttgaaaagaatcaataataattatcaatccggtcaatcattttaccattccgagataatcaaactaagttaccattctcccgattacaaacttgatatataaataaaacaatcccagttttttatcaaacaattaaacatagaataacttcaacaaacaaacaaaaatagaaatagaatcaaaatgtcaaaacaaatagtcgtcgttggtgcaggtgttattggacttacatgtgcatggattttatccgaaaaaggttataaagttacaatagttgcaaatagattcccatcaacttttaatgatgatatagattatacatcaccatgggcaggtgcacattttagaccattcccatcaacaaatgaaggtgatttaaaggatttcccattaacaagagttacatttgatgttttaaaggaaatttcagcaaaatttcctgaatcatcagttaaatttatgaaaggtattgattatgttgaagcagatgaagaattatatgcaagtttaagtacaggatatgcagaaggtttaaaaaattttgaaattataagtaaagagttattaccaaagaatgttaaatttggtgcaaaatatgattcatggtgtttaaattcaccactttatttacaatttttagaaagaagattaagaatgtattacggagttgaatttgttaattcaacagttgtttcattaaaggcaatttcacaaaattttccaaattcatcaattattaattgtacaggattaggattaagatatgatggtggatatgactctaagtgtttccaagttagaggtcaaacattattagttagaccaccaaagaattgtccatataagaatatgactgtcacacatagattaccaggtggtaagtattcatttgttattccacgtccatttgatggaggtattattgttggtggtacaagacaaccaggagttttaacagcagcacctaattatgaagataaggaagaattaattaagaatgcaatggaaagattcccagaattaattgtttatgatgataatggtaatccaacattagatgttaagaaaatcaatgttggatttagaccaatgagacaagggggtgttagattagaaaaggagagaattccaaattcatccaatagtataattcattgttatggatttggtagttcaggatttgagatgagttggggtgcagcagaattagtttttaaattagttgaagatgttcaatccaagttttaatattgtatagaaatttatagacttttcaaatttgattttaattacaataattacttataaaatgtatggaatttagcacaaagtattgtttatataaagtaaatctattaaatccaatcttgaccacgagattgtcttgattctaaggaagagcagaataaacctctctttgaagttgttaaaccagtacgtactataccagataataaattaacaccagcaacaacaccatcaataacaataacaccataaggatgaacagcttcttcaacagcttgtttcatatcagtcataccagcacaacctaaaaggaatacaatcagcatctttatcaacaactaatttagttgcaacatttttcataattgataaaacttcatctcttggttttgtatgtaattcagcaacttttaaaccagttgataaaagacctgcacaattgcctgataaaccataatttcttacaccatcatcatgtctaattgatgatctataaacagttgtaacaataccaaatctaccaccaataattctagaactataaattgcagcttccattataccacaagttggcatatcaaattcttctctaatacaattagttaatggatgatcagagaaacatgcaactaaacatgcatcagcttgtttaattaaatcatatgcatctctcattacatcagcagatgataaaacaccatcaagatgaccttcaacagttgttggaccagttattggagcagtataaccataaacaattgcatctgcaggtaaatgttgttcaaccattttaatacaattaactgtcattaattcagtacaatttgggttaattagtaaaattttttgaactttagatggatctaataaatcaacacatgatcctttagcaaatggtaatgtattaaggtctttagatggtgacattttttcgtttgttttgttgtattactagaagatattttagagaacactaaacagaaaacaaaataatttcagaaaaaattttcagaactcaaataataattccccagtcaatccaagatcaagatcaagattaaattcaagattgaaaaacttccaaacattaattccaactcaggatgtgaacatacactgaacggagtatagcaaacggagtacctcaaatacttctccatcaccaactgcaacgaatccttatcggtaagataagaaatcaattccgggaaaccttaattttctctcttccgtcggtaaagtttatgggtaggggggtataagggacccttaaattttatgatttccgaaggaaataatcgctaatactcggcatcaccgacttacaactgaattgacaatctcttatctatgtattccttattggtgttttaagaataagaaaagagatatacgattactgtactaaagtaggatagaaatacagtgtaagtaaactcaatgaaaatacaaataaaatatttgatgaatgcttacgtaaaaaaccagtataacagtactctattcggcaaagccagcaatgaaaccctaaacaatataactcgaatctttctcaactgaacctgtcaaagtaaaataaacatagctgtcacatataccaactgtaaacaactccgtccggttacccttgacatcttctccgtaatgaaactgttagcaaatgactattaaacagtcggtaaagtgtcactgctttcccgcgatgaaagacttctccaaaatttcacttatcagtggaaaaacttatattttcaagccattttattattaactttaatctacctttcctattgttcaagtgacttattttgcctctcaaaaccgttcaaagatattaaaattgtaccgatttatcaaatattggttcactatactgcactttgatagtttatctggaaaagtttcatttctgtattattattgttcttatctgaaagaatttatcaatttatttctttttcagataatatattcgattgataaaattatttctaatctaaattaatttagcccggatttgctatcttttgatccaacgtttaaataatttttgccatttcaatttatttataaggctggttagttcttctattttttctccagttcacatctacttcaattctattaatatttcaattatctcaataatattttttttattatcattaaacaagaaattaatatatcaggaatatattaattacaaaatcacacacacatacacatataaataaataaagatggtaagtgcaacttggttatcaaacctaagtgaaaaaatagcaatccctgatactgctgctgatacaaatgaagattcaattagaagtaataaagatttagatccaactaatgtcgaaggtagaacttggcaaacttataatttcttcttagtttggtttcaatcttcattaaatgttactatttggaattctggtgcttcattaattaaatcaactaaattagtttattggcaaacaatgattgcatcagttattgcaactttaattggtggtttatttgttatgtggaattcaagagctggtgcaacttatcatgttggttaccctgttttattaagagcaacttatggtgtttggggttattatttatttgttattattagaggtttcgttgctattttatggtttgcagttcaaacttattatggtggttgtttagttgatgttgtcttaagatgtatttttggtcataaatgggtaaatattccaaatcatatctcagaaagtcaaggtattacaactagattaatggttgcattctttttattctggttaattcaatggcctgtcattttaactcacccaactaaaattagacatttctttacattcaaggcaattgctttaccttgggcaactttaggtattttcatttattgtgttgttgttggtaaaggtccaggtaattttgatcttggtataccaattgttactaaaccttcacaagttggttggaattttatgtttgcaattaacttctattcttggttctatttcagctatgattattaatcaacctgatgttgctagatatgcaaagaagaaatcagctcctcttttaccacaatttattggttttatgttaagtaaagttgcaattcaattatttgcaatggttgcagttgcttcatattatagagttgctggtgaaacatattggagtttatgggatttacttaatggtatcttagatagacattggactgcaggtgcaagaactggttgtttctttgttgctgcagcttttggtattggtaatatgggtactaatttatttggtaatgcacttccatttgctgctgatatgactggtttattcccaaaatatattaatattattagaggtcaaatcttaatgggtgttatctgttggggtattgttccatggaaaatgttaaaaaatgcacaaactttccttactttccttggtagttatactttattcgttggtccaattttaggttgtatgcttgcagattattattttgttagaaaaggtaatttacatactccttcattatatacaagaagttctaatggtatttactacttctacaaaggtttcaatttatatggttgtgcagcttgggtttgtgcaatggcattaggtattccaggtttagcagctgcaattacaccaaccaaatattcagcttcttgtttacatatgaattatattggttggttaatgtgtacaattgcaggtattgttttccatacattattctccaaaataggtaaacctgcaatttaccctccaggccatgaagatactccaactacatttgaatatatggttccaaataatggtttctttgatgaagatgaaccaataaatggtgtttcatcaatgaattatcaaccttcttactcttcttcatatgaacaatccgatttaaaggatcaaactgttactgaagttatctctttagaaaacttaggtactagttcaagagattaattaatttttacttattccttttcacttttgtatactgttttataatataattcgatagattcttttaaaatgttttctctaatattatcacactttttcaccataagttacatacaaaaaatgggaaacccctactacctgtaaaaatgactggattaccaatgtacaatatctctgaacacgattactgataaatatagtataatcttgataaggtccgaacggctggaaaaggtaaacatggcacttctgataagaaaaacggttcggaaaagtcgacttccaactccggtgattatcaccaggttccccgaatttgagtcggagtttcacaaattaacatcaagttctccaggttcatggactggattaactgagtgaaagatccgattatattactatctttatatcccggtaaattgagtggtacgaggtagacaaatgatctatgatttattatctccattatttatctgaatttaaatatcttacacttccctgattatcttatcttatattagattatcatttgattattcattatacaaacaaaagttagttaatttaattatacaatgtcaactactgcaacacaaacagcagcttccgttaatgaagttccagaaaaagtcgtcccagcatcctcaagaggttatgcaatgcaacaaagaggtgcatcaaatatggcaatgggtaatggtaatccacataaaattccagaatttgatgatccatacaagaaaagagaatggattttagaacatatggcaggtgcatttagagtttttggtagaaaaggttatgctgaaggtactgcaggtcatatttcagttagagatccagttgatccaacaactttttggattaatccattaggtgttcatttttctatggttacagcaggtgatatgattcatattgatgaagatggtaatattattggtggtaatactaaaggtacaattaatgcagctggttttgcaattcattcagcattacataaggcaagaccaaatattaatgcagcttgtcatacacattctgaatatggtagagcattctcttgttttggtaaagaattagaaatgttaaatcaagattcttgttatttttataagagtaatgcagtttatgctgattttggtggtacagctgttgaaaaggaagaaggtgaacgtattgcaaaatgtgttggtgataccggtcgtgcattaattatgcaaaatcatggtttattaactgttggtgaaactgttgatgaagctgcatatttatttactttattagaaagaacatgtaaacttcaaatgcttgttaatgctgcagaaaatggtaaatatgttaagaactttattggtgatagtgaagctgcatatactaatttcatcagtgcagatcctgaaagtatgtacatggcattccaaccagattacaatctcgaaaaatacagagacaattctttcttatctaaatcttctttataaatttgtttaaatttagttttttaaattaaaaaaaaaatattacattgatgaataagctggtattagtgaattatagtatatcaattaaccttgaggttattatcatacttttcaaaaaacaaatcgactaaaaattattgggaatttattattgtattttataaactatatctatctatctatttattcaaaaattggattaagtggtttcataggacctgctaaagtacttgcctttcttttaaataactaccaatttgaccaccaataacaccaccattatctctatcaaaacaaacattacctcttaaaattgtatatcttggccaattagtaaattccataccttcaaatggagtataatcaatactatgatgtaacatttcattctttaattcaaatttattaattttattctttggataccaaattgtaaaatctgcatccataccaacaccaattgaaccctttgattcacttaaaccatataattttgcaggatttgttgaagttaattcaacaaatttttgtggagtaattctaccagtttcaacaccataacaaaataataatggtaatctagtttcaatacctggtaaaccatttggaacatccttaaaatgtggtataccattaattaaacctttctttttacctaatggatgatcatatttggaaggtgcatgatcactactgaaaacagtaattgtaccattaattaaatgtttccaaacaccttctaaatctttttgagttgatcttaaaggtggtgaacaaatatattttgcaccttgaaatttatcatcatgattaccatgattacaacaatcatgttttaaattatcacctgtaaggaataaatattgaggacaagtttcagcaaaaattgggaataaatcagtttgagcctttttaacatgatctaaagcagattcacatgacatatgaacaagtaacattggaacatcaatcattttagctaatgaaattgcacgatatgaagcttcatcttcagcaatttgaggtcttgaaactgtatgatagaaaggttgagttaattttttttcagataatcttttattaataaaatcaattatatctgaattctctgcatgaaccattgttgtaacattattttttctatttgttaataaaatttgtaataattgttcatcagataatttatatcttggataagttgtataaactttaacagaagtaattgattccttttcaacaacttcaggaaaactaatttctaacatttcttgagttggttcagaaataattaaatggaaaccataatcacaatatgaaccaccatttttatttgctctaccatgatattcttcaacaactttaattaaatcatattctttctttggttgaattgcaaatggaatcattgtagttgtaccacctgcaattgcagattttgaaccagattcaaaattatcacctgcaggtgcattatcttgatcaatatgaacatgagaatcaacaccacctggcataatataaccaccttctgcatcaatttctttcttacctgtaattttagcagttgttatagtttcaataataccattattaacaccaatataaactgattttggtaaaatatctgcagctgtaacgactaaaccgttataaatgactaaatcgtaggacattattaattatttattatttgttgtttgaagataaatgaactttttaggaatattattttaaaagaagaagttggtatgttataaatgttataaacagaaatactaacccctatataccatatagatatcatcatatagactcctcccttccctggtgttaatcaaaactgataagaagatgccatgcaatcaacggtcaacggagaagttggtgaaatttaccggcggttgaatttttcaggtttccaacttttccattgtggtaataatatactgatagtaatgttagtggagaagagtatatcacagtagtaaagagtagttagagtagtagagtaagagtatagtttcatatattaagcaataacgtaaatagaatatataggaaatgttatataggattataattttggagataaatctaaatattcagcagtacattcaagttcaactttaacttttggatttgggaaaccaacaataacacaagatctaccaggttgagttttaaaatatttttcgtaaactttattaacttctgcactatatttaccatcagcaataaataataaaacttttaaaactttatctaatgatgaaccacttgcaattaaaacttcctctaaatttttaattgcattttcagtttgttctgcaacactttcagggaaattaccttgagcatcattaccaagacaacctgatgtgaaaacatgtccattagatttaactgctggtgataataatttattacctgatttattaatatccgcccatgtaattttctcaatcattgtagttttgttactcaaataaggaatcaactaaagagttacgaaaagaaacaacataaagaaaagaagtgaaaagtaattaaaagaatttacaattgattaaagtaattgaacaatgctgatagtggtggaattctttcagaattgcctatttgggaagcttagccgccattggatcttaatcaacggcggataaccccatttttaccatataatcagtcgtataactcagtaaatggtagataatagactacagactatacgccgtagtagctctgtgtcagaagacaattaactgagtaggaaagtaaaggaaaaacaataaaagggaacccgtttgatgttctccgtagtatagtggtaataatgataaactgctattaaaatactaagatctccataactataacggtttcggagaacttgatgattccaggagttccttaccaaattataataacggacacggaatagccataatgccaaagaaaggagaaaggaaaatacaataggaaaagtaactggaaatggaaaacttgaagatcggagaagttgaccaggtctccgaagaggtattatcttgttattagatactgatttatttatttatttatttatatataacccagtatctgtagaagttgtatagttagatcagtttaccattcctttattaataacaaccaaacaacaaacaaaacagagaaataataatggcaggtgttagacaattcaaaattgcagcaattcaagttggtccaattgcaagagcagcaaagagagaagatacagttaaaagattatgtggattattatccaaggcagcagatgaaggtgccagattagcagttttcccagaattaacattaacaacttttttcccaaaatggttaatccaatcacaagaggaagttgattcatattttgaaaaaggtgatattactaaaggtccatgtaaaccattatttgaattatccaaagaaaagaaaattggtttttatttaggttatgcagaattaactgatgatggtcatcattttaatacaagtatattagttgataatgaaggtaaaattattaataaatatagaaaagttcatttaccaggttttattgaaccaattgaaggtattccatttcaacaattagagaaaagatattttgaatatggtgatatgggatttcaagctgttagaactaatcctgaatggattgatgcaactgttggtatgcttatatgtaatgatagaagatggcctgaagcttggagaagttatgcattacaaggtatggatttaatgttaattggttataattctgttgctaatgcagttggattatttggtgataaggaagataaaactttaagacaatatcatagtgatttatctgcaaaatcaaatgcatattttaattcatgttttgcagttagtgttggtaaatgtggtaaagaggaaggtcaagatttattagctggttcaattattgttgatccaactggtaaaactgttgatcaatgtaaaactgaagatgatgaagttattgttagtgaaattgatcttgatgattcaattattggtaaacaaaaaatgtttgactttgaaagacatagacgtcctgaatgttatactcgtcttgttgaacaaaagggtaccattccactcccaccttactctccttccaattaatcacactaatacaatacattctctatataacattccctttatataacaaagataaacttaataaagacctaataaacagttaatgaaccagcctctataatttacgtaaacattaattaaagcatgtatttatgcaattttcctattccttcatgtttcatcttaacaaccacttgttcttcctgagttggacacccccaatgagccatttcttagataatactgacccatgggccaatgatgaactcccatcaacagctaataatttaaaaacaacgagtaaactagatcaattagtatcaaatatggatattggcgattcagtgatgaatatatttggacaatcaacaacatcttcaatacttgattcaatacatgaacctaatgaaattttatcaagttctaatagtaataattggggagattacaattcttttaatattcttaataaagattcaggtaagaggtcaacaactagtacgacttctaaatcagtttccactccgaaggtatcatcatcatctgtgataaatactactcctggtatattggaagaagaaggagatgagaattatgaacatgaacatgatcaagatatgaatgaatatgaacttggtgattctgttcatttgaaaatatggacagatgatgaagttaagaaatttaatccattaacattgaaaaactctaatgatggattaattgtacgtgtacgagagatacctgaaaaggaaggtttagttttcaaacatatcaattatttaatatcacatactatcaaatacagtgaagaatatgttcaaaatgatagtaataataataataataataataataatagtaataatggtgaaacaaaagttataagaagatacagtgattttgcatggctcgttgaagttttatggaagaagtatccatttcggttgattcctgaactaccaccaaagaaatttgcatgtaagtaagaagattatttgtgatttttattaaacaatatactaacataattatagtagcttcatcaaatgatgttttatttttacaaaaacgtagaagaggtttacaaagatttttatttcaattatgtaaacatccagtattatcaaaggagaatttagttataatgtttttaactgttccaaatgattttaataattggaaaaaatttgctaatattgaaataaatgatgaatttaatggtattagattaaatttacctaaaaggtttaaaattgatttaactaatgtattgaagggattagttgatgaatatgaggaagataattatgatgatagtacagatatcgatcctgaagatataattgataataatagacagattaatcaaaatcaacatgaattagttattaataatataaatcaaatatgggatgaaaatccaattaaatatcaagagaaagattttattagtaatattggtaatattaataatattttaagtaaagtagctgaattatggtcaaaattatatatattagttgaaaggattgaaaaacgtgaaattgcattatcattagatcatcaaagattttcaattattttagaaaatttaattaaagttgataatgatttatttggtattaataatttaactaataatagtattaatgatgaaggagaacaacaaaatttgagtttaattaattcaatattatatcaagtaagtaaatattttacaaattttaaaaagaataaggatgaagagatggaattggtaagtaatttaaatttagagaattggagagttttccaagattatttaattagtttccatttccttattgaaagattttataaatttaagaatgaaagtgagagagagataagggaattattaaataatattattaaatgtaatgaaagaattgaacaattaaagaagaaatctgatattagaggtacagaagttgataaatatgttaatatgttaattaaattaatggatgatttaaatatgttaatttctagaataattttaacaaaggtaacatttattaatgaatttaagatatttcaaaaagttaaatatttaataagtgaagtattacaagattggtttaatgaaagaagtttatattttgataaacaaaatgatttaattcaaaatttagttaatgaattaaaggatataccattatgtagtgtataaaatttatatataaatataaaggattattattaattaactatgaaattttctttgaagcattattaaaacctacacctttacaagttgcaataagaacatcatcatattgatcatcttcttggaaataaaattctgtattaaacattgttttaatatctcttaataattgaactaaatgattatcaatttgatttttattaattatgaatctaccaatatccttctttaccaataaccataaatatgaaagccatatctaataaaaatcttggaattgcagcactattttctattatttctaaaaattgataagataaagattcagctaaatcttcaggagtttcaccacttgatgcgacatcatcaattatatatcgtaattgagatttctttgattcagtaaataatgttaaaccaaaaccaggagatttacctgaattttcacctctccaaacatcagtcgttatattaacttcacaaccagtatttcttaaaacttgacgagatgaatcaactaatctattaacaacagatggtgaaacacgagtacaccaagcaatacctctaattgaagagatatttggtatttccaacatatggattgtaattggttgagcaattaatgaattaactaataaatgaacttcaccacctgcatttggatatgaacctctctttaaagtatgtaattcaacatcttttataccgaatttatccattaaaggtataaacccccatttaataaaatctaatccaacttcaccctttattgatgttaaaccattaaatataattgaaaatttcttctttgaaaaaggagctaataataacattggtataataaaatatgatattgatttattagttggacaattatgagtaaatgaaccaccagtgattaaaccgggacgatagataagagaagtaccagtatatgatatttctataactgaaccattagtaactgattcaagtaatctaaggaatgaaatttcataatcctctaaacctggatttagagaatctgaacggatatttgaaattttaattgatttaccggataaagtggcaagtacaagtctagtggtgaaattctcatgtgtagaaaagtgtattattgaattggcagtattagacatgttgatctgatctgtggtattatctgtacaattcaagtctctttttcagtgtaaaggcagtttaaaaaaaataaaatttattatttccttatcgggaaggtgaaataaaaaaaatttttttgatgctgaaaaattttgaaaaacttttgaaggtgcacggattatttgtattttattttataagacgatcgacgctgtttttcatttcagttcttttcttcagtggcaaatcttagggctcattcagtattaattggtattgtaaggtatatatcattctgtatagcaatggactccgctgtcaactctctgaatccatcatctgcacagttgtctgataataaagagaataccacctctaaggagaatccaacaagtaaagacaatacatctaatgacacgaaaacaccaaagaaacaacaacaacaacaacaacaacaaccagtaatacctactgctagtggtaataatgctacacctacaccatcatcatcatcaacaacaacgaaacctgttaaaaagccaaccaataaatccagtgacaatcatgaagtattatctgatgcagttgcagcttcaggtgttaatatacgagctgaggaagaggcaatggcaaattcttcattatcattatctatatctaagaaacatattgaacaaaataatttcttaaaacatgaacaattaagttggtttattcataatatattagataaacaaggtattaaacctttaaatattgataatgatgtaacaaatttaatttcttcatcttgtgaaaattatatgtctcaaataatagctgatataattataatgatgagacatcgtagacatttatctgatattgttaataataataataataataataacaaatcaaagaataaaaaatcttctaaaaattctaaaaattcaatacaaaatttttcaagtataaataataaaagtgaaatatcaaaagctttaagagatttagcttcaaaacataaggaacgtgaagaaaaacgtataaggaggagaattttccttggtttggaagaggaaaaacctgttgaagaaattgttcaagatcataatcaaactaatttaactgcaaatctaatgatgagtggttctaaacaaaaaaaatattcttggatgcaatcatcttcaaataataattcaaattcaaattttaattctcttggtgataatggtatcagatatagagaagctagagaggaaccttcagtagttatgagagatttaattgctgctttagaaaatagaagaatgggtgtatctgaagttttattaaaagcttatgcacgtttaaaagattagcatttgtatcgtatatatataaccacttgcattctcatttgtatattatattaaacttgtacatttatctcactattctgatctttttcttcttaactattcccatttggggtattactttagtatctacttcttcatcgtcatcactactgtcagaataatcattaaatatcccagctcttttagtactttgatgttttttaaaagcattctctgcttccttcactaaaacactatcatcttcaactacaccttccttatcattattttcctctccattatcttctaatatcatcctcttcctctcaatctcgcccaaatgttcttgaagatcctctaattcctcaattctttcttgttctctctgttgttcctctaatcgtttctccaattgttccattgcattatcatttgataaattatcaattttcccatctaagtcctttcctctcccttaattccatatcctttttcatcttctcattttctttaaactctttatccaatctacttatcatttcatcaacagtttcattcttcttcaccttaccattattatcattatcatcatccttttcataatttttcttacatcctttaatacatttataatcaccattttgcggatcagtttcaaaactaagctctgcggcacatctcggacatctaaatgtaaacttaatgatcgatatacttaaataatttctatctgttacctctttacgtgcattgaatttccttctctgtgaaatatattcattacaattcaaacatttaattagaaaacggcaccattaatctaatattaaccacatttcgagactttcctcttgtttctgtgaaaacttcaccttagatggatcaacatccggtggataatacctattaacttccttcctactcataataccttgaaaagagattgattgtgatagatcaaagaaaggaattaaaattcatgtttaagtaagcgacatgaaaatttgttttgttttcgattttatttacttacctgccttaagagaaggtgtttctttagctgtagaaggtatagaatagagggtatataaggaactatggctatgttggacttggaagcagagactatggaagttttccaaagattcaatagagatagacaatgaagattttgattttaactattcatttaatatggtaactgatttattagctgcatcaccaatgaatataattgataatgaaacttttgaaacttttaaacatttaattgcatatgttcaagatggtaatgaattaaagaaattatcatcagtttatttcacattaactaaatctgttcaatcagaaattgagataattgatagtcaaggtttggatattgacgcgtcagagcataaacaggtattgtataattacatgtatttattattcatatcagtccatttcctagtaccgttatttactcaagatgaaaagaataagaaaaaaaattctaatggtgaatttgagaaaaggaaaattgataccttaactacaatactctcatcattacttggtacattctgtgaattattaaatcatcaattatcaacaattatacagggtgaacaagaattgattgaattttgtgatgttgttcttaaatcagcatatgttattttaatgtcaaaggatacaattaaggagaaaacgaataaatctctcttagttagattattatgtacagttgctaaaaattatcaacaaaatgatcaagtctcacatagattaacaatggcattaccattctctgaacatttagctgatccaatagcagaaattatttctacatcggtaaaatattttgataatagaaatttcctgcaaaatttccttctttcattatcaacaatttctccattgagtacaaatttagctaaaaatataagtattttattagttaaattatctgaatatttaagcaccgatttatacaaattcatgaattcatttgaagttttcgaaaaatcatctccaactgtacgtgctgcaacaatgatttgttatggtaattgtgttagttccttatcaattaatgaagatttaataactgattctaaagttttagacctaattgaaaatttagttgatacattggaaactaatttattagatacttatcaaatagttcgtcaaagatgtttacaagcattagaacttataatttcaaatgaagaatctaaattaaattttaagaaaaaatcatttcattggattttaatagcaaatcgtcatttagaggataaatcaagttttgttagaaaatcttcaatttcattcttgaaaagtataattaaattccatccatttacaatgaatggtggtaaattatcttgggattattattggaataattatatctatttcactaatatgattaaagaaattgataatggtatactctataatagcattagaagaaaagaacttgatgatgatgatgatgatttaagtgaaattatagctcccgtagaggataaaatggatgatgttttcaaattaatacaaaatgattcaaatgatataaatgatgaattagatgctaatataattaataattatgaacctgaagttgctgaacttgtgttgaaaaggaaatattgtagagatgcatgtattttcattaaattattagataaatcattcatattagttgcaacattattaaattctaaattaaaatcagataatgtttcagcaattgaatttttcacagttggtgatgcctatgaaattgcttcaagtaaatttggtataaagcaaatgttacatttaatttggaaaagtggttcaaatgaagatggtaataaagttgttgaaaaattaattgaagcttatgtttcaatgtttttaacacctgatccaaatgcttcaaatgaacagaaaacaatttatattgctttatcattgattaaacttaacatataattgcagtttagctgatttaatttcattggagaaaatgattgttgaactctgtaaaggtaaagagattgaaaaatcaagaaaggaaaaagaatcaagaaattataaaccaatgtatcaacattatataacacctcaagttataaatgttttatggaatagttttattaatgcaaaacatcctaaggagaaaaaaggtgcaattattatattaggaatgattgcaatttatgattataaggtgattaatattgaaatgataattaatcatggtatggatttaaatgatttaaatgtttcaggtcgtttagatgattcacaaaacttaaatattgaaattcacaaaattttcatgtattgcattaagaagatcaataccgaaaaaattaccaaaagatttcatttatccaaattattcagttgcaattgaaattttgaagaaaattttattatggaatacagttaatggtgattggtataatttggctgaagaggtacttaatacattatatgaaattgatattaattctgatgattcatcatctgaagtattgaaacagaaatcctatgattacatttggtgataatgatgaatcagttgataaaacaacattactgagccaactcttatttcttgcaggtcatattggtttaaagacaattatctttttagaaaaatgtgaagcagaattcaagaaaaagaagcaagaaactgaaaataataaagatgaacaagaaatggaattagatttaattggtggtacaaatgaagatgattttactgatacaattcaaaacattaaagaacgtgaattattatatgggacaagattccatattatcaaaatttgtaccattaataattgaaattataacaaagccaaaacaatataagaataaatttttacaaagacaagcaacattatgttttgctaaatttatgtgtatttcaccaagattttgtgaaactcatttaggattatacatatcattaatgaagaaatcttcagattcaattgttcgtagtaatttagttttaggattaggtgatgttgcagtttgctttactaatattattgatgaaaataagagtgcattatatagtgaattacatgatcgtgatttattagttcaaagaacatgtttaatgacagttacatttttaattttagcaggtcaaattaaagtaaagggacaattatcacaacttgctaaattattagttcatgaagataaagggattaagggaaatgtctaaattatttttccaagaattagcaactaaggataatgcaatttataatggatttattgaaatgttaagtggattgaatttgaatattaatgatgaagaacaggatgataaaaccaaaagggaatatcaagaaccttttccattagaacattttaaggaagttattaaatttgttttgccattcattaataaagataaacaacgtaactttttgattaagaaattagatagtagattagagaaatgtacaccaaatgaaggtattagatatgcattctgtataaaggaattgattagaagagatgattttggttcaaagaaagattcagagagtgaaaagagtaaatattataaggaacttttagagaaaatagctagatttgatcgtttagagagacttgatcctacacctccaaaagatgattgaattataagtatatattttatgctataaacaagtttataatttttatattataatatttaacaatctattttttacttctatcaccaaaaaattcatcaggatgtttgaaaacattctttgcagtaacactacctaaattataatctaatggtaattgttttgaatataatttaccagattctaaatgatccttaactaaatctgctaaaccttgatggaataatggatcaccatttaatgattcacatctaataactttttcaggatgttcaacagcttcctttaattcaatatcaatttcatgtaaagtttcaatatgatctgaagtaaatgcaattggaacaataacaatacctggaactgaatcaaatttaactaatctttgagatgttttctcagtttgtgcacctaaccaaggttttggaccaacttgtgattgccaagttaatctataaggatttgaaaaatttaatttttgcataactgcataaacagttgcagatacttcagctggatatgaatcacctctatttataatatccattggtaatgaatgagcagagaattgaataacaacattttttctaatttcttcagggaattttaataatgcatcattaatatgatttgcaaatgtattaattaaacatggatgttgaggccatctatcaataattgaccatttaatttgaccatttggatcatgaactttagataatctatataaatcattaattgaagatgcagttgttgaataactaaattgaggatattgactaaatgcaacagctcttgtaataccatcatctaataattgttttaaagtttccttcagttaaaggatgtgcataacggaatgcaacataaggtttatgaggatgcagtatttggtgatatttcatctaatctttcacaagctttctttgcttgaaattcagaccatttacgaattggtgatccaccaccaattctagcataatatttttcaatcattggagttcttctccatgtaataaatttagctaaaatattttgaaatggtcctaaggggattaaatcattatcagagaataatctgaaaaggaaatctcttgtttctggaactgtcgactggacctcccatattcataaagacaattgctgtacctttaccatttttaacatcagcggtaccggtgccgttcccaagacgtttagcagatactgaaagttgacgtgtaaaatttcttaacataggtttccaattaattaagtgattgcttaaattacccgtagtatatatataatgtaataacagtgtaataacccttgtaaatagaagaaaagaaaaccagagtggcaaattaacaggattaaaaagtgttgataactaataataataataataatgattcaatatctaatgcatgatgtaaatttttcaaatttatgacgaaatggaacattaataagaacaataaagtctttttacatgtatactttctctaaggatgtcgtttgatattcaatgggataatatatgcaatgatgagacattggcattaacattcaaggaatttcttaattctaaactatctgcattatcattaccacattatttagccaatcttcatgtggttgattttaaattaggtaatgttgcacccgatattacaatacgtgatataaatataccttttaaggagttctatgaagctttagatgaagagaataatgaaggagaggatcaaaaagatggtaatgatgttgataataagaatggatcaaatgattcaattaatgatggaaataattgttccgataatgatgatttatatgatcatagtaagtacagtgatgaagaagataaagaagatgatgatggggaggaagagggggaatttgatgatgaaaaactctattttgacgataaggaaagaattggaagtataaaggatcaattaactaatctacgaagtaaaaataataataataataaaataataataataataataatagttacaatagttacaactataataatcaatttgaagaatttaaatcaataccaatgacacctagaaataaattcactaactctagatcatcatcaccaacaaatccgttgtttatgaatggaccgcaatcattattaacttcaagaacaagttcaggaataacgcccactatgggacatttaggtgttggtataacaggatttggaatagcaggagggaattctaataatacaaatacaaatggaaatggaaatattaacaatgcaaacatgatgagatcatcaactagtggatatagtgaaaacgattatttccaaccatttgccaatcatacaatgtacggtaatgaaaaatctttaaatagtatattacagggaatgtcaggtatggaaataaatgataatgaatccatatatgaaaatgagagtaaaataaataatttacaaatgaatgaaaccaatataaattctaattctaattctaatataatgaaaaaatttgatacatcattagatattcaattatctgttgatattgattggaattcacaattatatatagaaattttttgtgatttattagttaattatcctgcacctgaatttattagattaccagttagattaaagataacagatttgaaaattcattcattaatggcaattgcatatatttctaaacgtattttcatttcatttttatgtgatattgatgatggtaataatgataataatgatatgaaaaaaaatgatgattattatgaaaatgaatcaaggcaaggttcaagaaaatcaacaacaactgcaagtacttcaactaatatgaatgattcaacaacttcaacaaagggtaaggaaagaattgatattttgaaaaatatgaaaattgaaggtgaaattggtaatatatttgatttaaatgatagtaataattcattgaatggtaatattacaccaacattaccaaggtatagtaatatgggtaatggatttaattcacctatagatatgacacaaaatggaagtatgaatgatgataatactgatacagggttagttttaagaaatattggtaaaattgaaaaatttttaataaatgcatttagagggataattattgaagaactagcatggccagggtggattgaattagattttaatgaagtattagaagaagatgatgaagaagaggaagagaaagaagtggatgaacataaggaagaggaaataaaggataggaggaaaagtcaaaatagacgatcatcatcaatacctagttcaaggggtaaggaagaattcacatatattgatcaaaaacgtaatatgaagaatatggaagatggtaataataatattaatgttgaattacatgatgaatatatgtcaagaggtccaagtagtagagaagatatgtccgtttattctaatgatagttattttacagataatgagtagattttatagattatataagtgataatttaatgattaatgactaatttactgaattttagggtttttggagtaagattagtgatgttgatttgtaaatatccaaaatatctcaaataaaagacatgtttatcaataattaactttttcaattctttatatttctctttcaaactagcttcataagaagaccagtagttactatacccatttccctttattcctagctatacaacactccataaagctattataaataagtaaataacccatacccacaacaaacaccggtgtcataaactcacagaacagcgctattatcggaatttaattcattattgaaaagttgaaattgttccattaagagatgatatttttttaagacaatttctttcttttttcagggtatatatctaatgaataaatatagacagggtattagatatttaagtttaagtaatagattattaaaggagacacattatgatatattgaaaataccatatgatgcaagtataagtgaaattaagaataaatttaagaaaatttcactgaaattacatccagatatgcttaaatcacaaaaattatcaattgaagaaatgaatgaaaagaataatgaatatcttaagattaagaaaagttatgaaattttatcaaatactgacaaaaaggatgaatatgatttacatttaggtattaaaagacgtgaaggtacatcaactaattcatttattaataataataaaaatactggttcaacatttcattttcatgaaaaatttgattataatgatataccacattttgataaacataaacatgaagctagaaatgaacgtacggagagaagattatgttataatcaaaaaattaatcaaaatattgatattttcggacgtgatttatataagagggaacttggatcaaatggtcccaggaaggggatttatagagaatataaatatcaacctaatataagagatgatgagaatgaaggtaagaagatggcaagtaaggtaattggtggaattgttggagtatttttaatgtggtatgttatatgtgggaattattcaactaagaaggaagaaaagaaagttaaacctttgaaagtagtagagagtgataaatctgaaccaattttagaggaaaagaatagtgttagtaaaagtgggaagaagatgaatgttaataatacttatggactgtcattgattaaggaaagatattataaaacgagatattgaaaaggagtttgaggaacaaattgcagagagtgttgaatagaggttaaagtacatcattattcattattagtaaataaacattatataaataatataatcattaatattagatatcactacttaaagcacaaagagcagcaccaacacttgaaccatcttttgaaatattaatatgtaaccttctttcacctttactaccaacttgagattctgcaattgcatctctcatcattgttctaaaaccgggataaaattcaacaactgaaccatcaacaccaacatcaacttcaacattatgacctttaaaagcatcaattttcataattaatgcagtaattggaattgaagctaaatgtgaagctcttttagagattgatccttgttaatttttgaataactaatctttcttcataagttgttggtaatcttaacatatttttcaattctaattcagttgcaattaatttagttgaatcatcaatttcaaataatgacataccttcagaatgataataaccaaggagttcttaatctatgaggtaaatctgaagttttactatattgatcgaaaattaaaccttgagaatgtaaatcaactaaaacatttcttaaaatttcaccaaggaacatacctgaaactcttttttcaaacatatgataaccaggattaacagataatttatcaacttcttcatcatatttagtaacaggcagtaattctaaatcattatcaaaagacccccattcagtatttataaccatatgatcaatatttttcgattttaaatcattataaatttcagttggtaattttttaatattttctaatttttcattataagcaccattagtaccagtaccgaaaatacaaccaattgaagttaaaccttccttattttcaccagtataagatctagctaataaagtaccaacggtatcattagctaaagctgcaacatgaactgggattttttgttcatctaaatgatattgtaaaactttaacaacatctttaccaacagtatcaggtatattaaaaccttttgtccatctaattaaagtaccagaattaagagaagtttgatcaacagggaaactaaatgtaaaacctaatttaagatgatttgatttatcattattatcattattattattatcactattaaatttttcaccatgatgttgctttacaaaagtaccaattttagaagctaaataagagaataattcatcagttgttgatttcattaaatctacaggaattggatttttagattgttttaactcgaaagtatgatcaccattaagtttaacagaacaaactctaaaattagtaccacctaaatcagctgctaataataaacctttttctttaccatttggaattgaagtaacaaaagttggaatcattggtaaataagatttacttgaagatttttgattaagaccatgttcagcagatttaataaataaatcaactaattgttgtaaacgattagaatctaattcaaatgattgacaaattttatcaatttctttacttaattgagcgttcattgtatatagagagttgtattataaaaagagagtgtattaattaaagaaaagaaaggagaatagaaaagaaaagaaaaagacacaagtatcaacagaaataaaaaaatggaaataatcatgttaaatatcaaaatagagatggaaatggttaatccgaacagaatacatgtccccacagtaagtcaccccacaataatttactattataatattattccgatgacgttattttattattttattatgtggagtatttgatataccgtcgcatcgtctgcagtctgtattgtattacgtaatgttgagcatgtctattttcattttcattagttacccgattagggaataagaatgaatcattattccagtttttttttagaaaccaccaattaacagcagacaaattaaccctttgtgcacctaccttaactgttcttttatttacttatttatttacttattgatattgatattagttatttttagttatctattatacaaacgaataatgaattatttcatcttattttattttattttattttattttatttattccctccatttaacaaatacttcatcagtacgaaatttttgactacaaacactatcctctatttgacaattacctcccattctatattctaaaatacctgcttgtgcaatcattacaccattatcaatacaaaatctttcatcagttgcataaacataaccattacgatcttttaccattatattcatcatttcttgtaatctttcattacaaccaactccaccaacaattaaaacttgatttgaattaacatgtgccattgctctttcagtaatttcaactaacattgcaaataaacattcttgtaatgaataacataaatcttcaattttttcattttgacgacgtgttaattcttcaataaattctaatataccactcatacttaaatccattcctttaactgtatatggtaattcaataaatttcccacctttcttacctaattgttcaatattataaccaggtgatggtgaattagaaatttttaaaactcttgcaaatctatctaaacaattaccaactgcaatatctaatgtttcaccgaaaattctatacctttgtctactatatgcaattacttgtgtattacctccactaacatataaaacaactggattatttgcacctgtaacttctctacccatttcaatatgtccaacacaatgattaactccaattaatggtatattccacattaaacttaatgtacgtgcagcaattacaacactctgtaatggtgcacccatacctggaccttgtgtaaagcaaatacaatttatttcattaatttcaattttagcttcacttattgcctttgcaacaatccttacaacccaatttctatgatgtcttgcaacatctcgtggcataaatccttgtcctggtggtgcattatatgtatctcttatattacttaatattattgaacgattttcaggatttgatggatctccaattggttgtttaataataccaataccaatcttatttgctgatccttccatacctaaagctatataccatttctgtccaggtttagctcttgtatcaaagtctaatttcatattgagtgtctatgtatatgtgtttgtgtctatcaatatataaggttttcaatgaaaaatacttcaataaaaaattcatgaaaaaaaattcatgcacgaaattactaagagtcagtaatagacaacttttactagtagattttatttgaatgattatactggattttatattataaaggaactatacgattaaacagaaagaagtaaacaaattagacactaaacaaacaaacgtaacatatcagaccatttaaactcttttaaaatttctctaacatcaacattagcatcttcattagcatctaaagattttttagtacttgaattatctgattcaatatcaacatttgtagtactagtagattcataaatacttgattcaggtgattcaataacaccaaatgctgctgtcattggtttatccaatgcatggaattctttacctgttctcttacaatttaagtaaataattgaaatacgaactgcagcacataataaaccgaaaacaataccaccaaatggtgtaataacaaaagcaccaaaagcaccccaatcacttggatcataaacaccattccaaattaataataataaaccaccttgttttgcactatcataataaattgtaccgaaaacgaaaactgctaataatgaacctaatgcaccaacaataacatctaaaccacgtaagaaaaagaaatgttcagataatcctaaaaacataattggaacgattgcacatgataataaatctgcaataaaataaatttgtaaaacatttgctgaacattcaattgcaacaactaatgcaggtaccataataataacaacaataattcttgaataaataattgggaatttatttctaaaaatatcatttgaaattgttgaagtaacagctgattgtaatgaatcaaatgtacaagttgataaacaaactgaaaaaattaaaataactccaataatccatttatgcatatcagcaattaaaatgaaaaatgccatataaccatttggatcactaactgttaatgcacctgtccaaactgcaagaatacctggaataccaactaatgtacaaataactgcagttacaaatgctgcaatacctgtagcaatatataaatctttatcagttttagctgcaaatgtacgtaaccaaaaaccagacataaacatatcattagttaaaattgcaacatttaaaatatagaaaaccatccaacctaatttatttgaacctgtcatttctttataagtatcatgttttaattgatcatcaatatgaatttcagttgcataaccaataacaccaataactgtaacaactaaaacaaataatgcttggaaagtatcagttacaaatgaaactgcaaatccacccattgaagtataaatagttgtaacaacacattcaacaacaattgcagcagtttgatctaatcctgttaatgcattaatagctgaaccaactgcacttaattcagaaaccataaatagataaagtgttaaaacagttgcagctgataaacataaactcataattggaccatatctttgattacaccattcagttaaaacaaaaccatcaggacatcttcttctaattaatggacctaaaaatgaaaacataacaattggaactgcacctgctaaaacataaacaagtaaaccttgaatacctgcaatattagcaatttgtgtataagtagttaaaacaccacaacccatagctataattaaaaaaagttaaaatattatgttagtacaattgacttgaagtgaatgaaaaatggaattgatggtaggtagtactaataatgacggaaagtcactatacgactttctcctattcaaatccatttttccaatagaatgaaaaaaaagtaaaataaaaacatcacagtgattaaatgtagaagtgatataaggtacctctttcatatccaatcactgtaatgtttgaataaaagaaaagagtcaacctctttttcaacaatatatgataatcctcccgcaagtattaacttgatcgagttaaacggtataatctcagccaacggcacccgtatatcaatattgtactaaaaagaagtataaatatggaaaactaattggatattgagatgattataatgattattttgttgaaaaaagttttatagttggaaactatttcttttgtttttgttacttcaaagaaataaaataaacaaaatatactaacctgaagcaataaaattaagagctaatgggatccctgttgttgaaccatttgatgaaagaaattgttgacctttggatttacgatattgaatgattgccaatgcaacaccagatactagcattgcaccatatgacaaataaataattgcattagacgcttgaaatgagagacccattgttgccaaaagaagtagaagaaaaggaaaagaaaagaaacaaaaaagaagaacaaataaatgaagcagaaacagaaataagaaatatgttcatctctttatataaaatttttttttcattgaatcattttaataatcgtatgttgcattgtttaatttaatttatctaatttatttaatttatctaattaacttacacactattcagagtcaaggagtataatctcagaggtgtcccccatggatactgactgggagacagagaccttacgcttattctccttatccttatccttactcttagacttcttcttcctaggtttttcaatacgactctttgtagtgtccggagagtcaatttccgaacttctagatttaggttttttacttctaactttatttttcttagatcttttaagtacagttaatgccgtttctgtttctgtttctgttcctgttgttgatacgtcatttactttttcccgtttaacggaaaaaactttaatttcagggttttctactgtaacttcattgacaagttcaattgaatcattatcactatcttcctcttttttaacgtcgggactaataatatcaacttcattaatattttcaccatcattaccatcatcatcactagcatcaatatcttcaaccatacttgattgtgcagccggattactaaattcctcaaatgaattatcattacctgtaacatttaatggactactaacatccgggattggttcagttggactttccttattattatcatcatcatcatccttattttcttccttcttaagttcattcatactttcagcttcctttaaacatttatcaatataagtatgtgcctttaagaaactattcttacaaattaaatcactatttaaaacttcatttaaatcaccttgacataatttttcatcatcaaaacattctctaaatcttcttaatttattaatatctgcctttgatgtaaatgttaatttagttaatgatctaataattggtttatataatgttttatgaagtttattatgatgatcataatttcttaaacatttcattaattgaataccaaattctaaatgaactgaacttgattccatttcttcatcatcactaattgctaaattatatggatctgtccaataaaggaaattttcaattataaatgatgcagttattggtttctttaattctaattcttcattatatcttgtaattgaatcccaatctttaaataatcttgtaattgtatcatttgcaatacttgcaattaattcttgatgatatgctcttgaaaatgcatatgttggtatacaaaatgttaaacattgctttaatgcttgatttttattaacttttggattgaaaaatgttaataatgttgtctcaaataattcatgatctgtaataacaccacataaaaataatttaaataatgtaactgcaacaactgattgtgcctcaggtttactctcatcctttaatgttctataaaaaactttagcaactgccattgaatcaatacttctttgattttcactttgtaaaatacttaatccatgaattgttaataaatctccaattacttttaatccaacaacaacaaatgattcatgatcacttcttgtaacgaaaatacctgcaacaaccattgttgaaactgcaacttccttatctaataaaccacataatccatgacaaattaatgctaattcacgaacttcaacttcagatctttgattaacacatggtacaataaaattatctaataatgaaattaataacatattttctcttaatggtgaaaatactaattgaagcatacatttagtaattgttaaacaatctgttaatatttcaggtgataaaacagtaatttgatcaatttcttcttgtcttgatttatttgcttcaatcattgattgtcttgacatatcacctgcagctgaatggaaatcatcatcactatcagaatcagaatctgaaatttcaccatcatcccttaataaattttgaactttttcattaatattttcaaatcatatcattatcattatcattatcattaatagattcaatatctcttgctcgaagtttattttctgatattttccttaattcttccttttctttctgttcttgccttcttttaatttccattattctttcataatcagaatcttttaaatcattaataatttcaacagtcatttgacaaaaatctctttcattaattgctaattttctaagacattccattaataatggtaataatggttcagtaactgtattattacttaatgttgttcttaaaatactgtacattttatttctaccaaattcatcactataatcataatcaattgcaattttaagtaattgcattacaatataattataatcatcaggatcaataattccaatttcattagcatattctggatttttcataattttatctctattattactaattttagttaaattttctgtccttaaattaaaataatgttcaaataatgatgcaaattctgttgcttctaaaaattgattttctaaaatattatttaatttattatcttgacaatattcgaaaacaattctaacaaataatgaagatgatggagttaaattattgaaaaattctttattaaatttagcttctttaacaatatttggtcttttatcaagtaatgttctaacggcaatttctgcaatatcattttcaataacatttaaactattaataaattcagcaatattattatttaaatcattcatccaagtagttgttaaccaattagcacaagctttcctaacagattcatcacgatcacgtaacccccattgtaataatttttctctatgatttaaattaatttcattaaaatgtttataagttggtaaaatttttgaaaataataatcttctattaataatatcaatatcatgagctctttcaacaatgaaaggttcagtaaatttatttttttcaatatgttttaaacatgatcctacgaacttcagaatttggatcattttgcattacaaatctaatttttttaccagctaatgataatgaactaccatcatcattttggaaacatgctaaagctgaaattgcctttattctaacaggtgcatctttatcataaattctagttgttaattcatcagataatgatttatataaatcttcatccataccaccacaattactaattatatgtgataataattgacatattctatatctaacagtattattagatgcaactaaacctttcattaaatattttaatgtacgttcaacaaaatctgaataaatatcctctaatttatccattggtatattaattggaattttattattattattattattattattattatttttaataaaagtttcacttgatggattaacaaaatcaaagaatgatgaaataaatttaacaactttatcagctggtttaatattctttttcaatggtaaaattttattcaaaaggaaacaaaagaatctattaaattcaaatgacaagtttaaagtatatgatttatacattactgcttgtaaaaccacctaattgtcgtttatgagctgcaactgttgtttgtgattcattaaatactttcctcattgcaagtttaatatcttccatatcattgatttctccaataacatttaaatactgagtttgtttgtttcttgactttggccttttcttttcatctgcttttctgatagcttcatcaatatctccaccctctatatcatcatcatcatcatcatcatcatcttcttcttgatcttcctctcatcatcctcctcttcttcactgtcatcatcattttcactatcatccactgcactttcctccccatttcccacctcatcctccattctcatttcctcaaatgcacttctctccttcttcactctcatatgatttgccattgtcgtcttacccttactcttactacccatgattacttgtctaaaacagagctgagcattataaattatgaaacttaaagtaaacaagcgaaatttaattttttatcactgattacgtaatattagattagtagatctatttacttacttatacttaacttacttatacacttacttactttaacttatacacttactttaataaacctctgaatcttcgaaaagattgattttaacatcccaaggtggattaccaactctttgaggattttcaataccaattgattctaattctttaacagtattttcatctaattgaacaattttaatattatcaataattctctttgaactaacagattttggtaaaacaacagtacctcttgcaacagcccaagaaattgccagacaagcaggtgaaatattattctttttggaaatattttgtaaaatttcattttctaaaactggagcaccagttgaacctaatggtgaataacattcaattaaaatattattctttttacaaaattcaattaattcaatttgtggtaaacttggatgcatttcaacttgattacaaactggtttaattttaatttctttatcatttaaaattttctttaattttggtatattataattagaaactccaattgccttagttaaacctaattcaactaatttttgcatacctttataagtatcaatataattccattcatcatatggtattactaatcttttaccttcatcattaattggcattaaaacatctgctttaggaatagcaacaggccaatgtgttaaatataaatcaatatattctaaatttaatctatttaatgattcccttaaagctttttcaggttctttacattcagaacaccataatttagttgtaataaataatttatctcttgaaatacctgattctttaatataatcatttattgctttaccaactgattcttcattaccataaattctagcagtatcaatatgagtgtaaccattctctaatgctgttttaacggcattataacattcttcatcagttgatttccaagtacctaatccaatagctggaattttagctcctgtgtttaaagtataagttttagtacatctagttattgttagtatttcgttttgttagttggtagttatttaagagtatacatacatttcagcagtcattctggttggttttgaagaagaaagaaagtggttgtaattgagtatattttgtaggaactgtggagtttttatattgtagttattgattatgattatgatactttatctattaatggcgggagttacctaattgggtaatagataagagaatttaaagacctttttaaagacctttttttctacctagtaggttatcaatacaataagtcaagagtacaaacagtccttctctttaatgtatctgtttagtatattgtattctaatataatgtatattacttgacaatgtattaacattaacctataactgtaaagcacttcatatctattgacgcgacttcatgtattattattattattattattaacatgattttaaatttaacttatactacaatacaccacttttcccttaccaaaagtcaattgaatgacagatataaaccctacatttacattatataatgaaactataaggaaccctggtagttcaataactagtatcaatggatattttattgaaaatgagaaaaatgaacaaattatacgtgtaactcaaacttcaattgaattatggaaatttaataaaaatttacaaacatttgaaattcttattaatcaacaaacatttgcaaataatgtatcaattagtaaattatgttttgataatattgctaaaaattatttagtattgacatcagatagtgggaatttaacattacttgaatataattctaaattaaataaatttattgatttaaataatgaaattttctataaaacaggtttaagaaggttatcaccatgtaaatattcatgtattgacccaaagggtagagcaattatgatatctgcaattgaaaaaaataaacttatattcccaatatctaataatgacaataatataattatttcatcaccaattgaagcaaatagagataatattttaacttatgatataaaatcaattgatgttggtggatatgaaaataatccaatatttgcagcaattgaatctgaatatggtgggaattccaaatcaattaattattatgaatatgatttaggtttgaataatattctcctattagaatctagaaatattcatgattcaagtaatcatttaatcccattaccaggtggtgataaaggtccaagtggaataatagtttgttctgaaggaatgatccaatacatggcaccatttaaggaaaatcattatttaccaattccatcaagaaatgatagtattaatgttaaatcaataataataactagtgtagttcatcaaatgaagaaaggatttttcattttattacaaaatcaattctctgatatttttaaaataactatagattatgaaggttggaatgttaaatgtttgaaaattagatattttgatacaattccaatttgtaattcaatttgtgttttaaaaaatggttatctttatgctgattgtcaatttaatgatcaaattttatataaatttgaaaaattaggtgatgcagatggtgaaatggaatggaattcccttaattatcccaatgaagaaataataagaaataaggaatcaaattcatttaaatttaaggttaaaaaacttgaaaatttgaaaattgttaataaaattaaaaattttaatccaattattagaattaatttatcaaatggtgatttcttaacatcatttcctgaaatttattcaatttgtggtattaaatcaagatcatcattgaaaattttacataaaacaattaaattaaatgaaattattacacaagaattaccatcaaatattttaaatacattttgttgtaaaatacataaaaatgataaatttgataaatttataatattatcatttttcgatggttcaattattttaaaaattggtgatgaagttgaagaagctgaaaattcaggtttattagataaagtaagtactttaaatataatgcaaattggtgatcattcaattattcaaattcattcaaatggtattaaacaaattatttataataataatgatgaaataattaaatcaaatgattggaatccttcaattgatttacaaattttaaaatcctcttgtacgaataatcaagtttgtcttttattaagtaatggtgaattggtttattttgaattacaaaatgaatcattagtagaatacactatgcataaaaattttaaatcatcaatttcacatctagctttcatttctaatgaacatttctctaaatatattattgttacatgtaaggataaatcaatgcatgtaatttcaacagactcaaagaaaatgttagaaaatatagatactgttcaattatcaaatattagtaattctttccaaataataaatgatacagttcatattggtttgaataatggtgtttatgtacgttatacattaacagatgatgggaaattaataaataaacgtgaaaaatttattatggcaagtccattagagatagttgtggtgagttttagtaatgttatgatagcagttattaaatctgctacatcatttatagtcattcctaacgatgatgatatagatattgttccattaccgattcctgaaaaattcatcgaaccagaagaggaggaggatgaggaggcagaagatgaagaggaagtcgaatactctaaaatttatggatgtattgaatcaatccattcagctgatgttccacaaggtttaattttagcacatggtacaaggttaacaattgcatcaatagattttccaaatgatgttaaattggaagatattaaaagaattttaaaaaatgataatattgaagatatcccacttcgttacactccaagagatttatgttgtgatttagagaaaattaatggaatgagttatataatttgcagtgatagtgatattttatcaccataccaaaaaggtgaaggtgaggaagattattaccttatgataatgaaatttatgaagaatatgatgagaatattgattatacttataaagaaggaaattgtggaacatgtattaatgtttattctactgagaaatgtgcaattggtcaaacgattgaaatattaggcggggaaatagcaattagaataggttatgctaaagttgatagcattgattatatttttgtaagcacaattaaggaaacaaaatatttccttacgtgtttatattgttgaagaagatggtagtttaacattcaaacataaaactgaattaccaacgcagtttcatcaattaattcatttaaaggatttgtaattattggtatgaataatgaattaggattatacagtattggtattaaacatattttacgtaaatcatcgataaagatccccttgggtaaaataactaatattgcaactaataataaacgtatctatgttaatggaaatgatggaatgacagttttagaatatttaacagattcttcaatgtttatcatcctttgtcaaagtagtttaccacgtcatattacaagtagtgttatattagatgaaagtactattattattggtgataaatttggaactattagtggatggagagttattgaggaatcagatggtgaatatatgattgaaatgattatgagtttttatgttggtgatgtaattacaagtttaataaggggtagattaaatcaaaataatcaagaatgtataatttacagtggtattaatggtactataggaattatgaaaccaattattagtttaaaggatattaattttttcaaagaagttgaaaatataattagaaatgaaggattatgtggattagataattataaatttagaagttgttacgtacctaaaaaagcatgtattgatggagattatttgatagtgggagatattaataaaatatcaaataaattagagatggaaattaatgatgtttccaaaaggttaaagagtgtaaaatattaaataaaaattctatataaactattaattacatccaaacatttttaaatggatcattagaatttgaatttgaattagaatttaaatttaaatttaaatttgaatttgatgttgttgtaatatttgaattaattgaattgaaagaattaacagaatttgttgaattcattgtacttggagttgaataaagacttaaaattgatttcttcaaatctgccttattaggattaacatttgcaggtgggacaaaagtattaattgcagctccaccaccagtttgaattggcaatattggttcaacaaattttttaacaggttgttgtttttgtactggtacttgatactggtacagttttctctactttagttctcttccattttataatttttaataggttcagatccattacctttccatttacctaaaacatatttagtccttacaaaactttcaactttaccatcaattggaacataaccaccaattttctcttcatctatagatcttgctgataaatttgcttcccaaagagaatttgctcttttattcccccatttaaccatactttcagtttgttcatcagtccatgaatctaaatcaacagatttaacccttgatatatgagtacctaatgatctatgtataccactacatctaatacaaataaatacacctaaattccatgatgcccatcttggattacgtgaaattttacaatctgcacaatgtttattatattcatcattcaataattcttgtagtattgctttattctttgcagttgcagtagttgatttattatgtgacatggttagtgaaagaaggtgataattgatgtcggaattctttcaatttccaatcaacattgtgaaaatagagatatagtgcgatttacgtaattatatcatatcatattattattattattataaaagaactactaaataaataaataacaaagacattaattaaaatggagaatctaatcttgataaaacttctttacctttataataattatcagttttaattgcctttgcaacaacattatcaattgtaaaaccgaatttttcaaataattcaccagctggtgcagatgcaccaaatctatctaaaccaatatgagcatgagaatatttaccccaaccaaaagttgtcataacttcaatactaataactggtaaaccatcagggaaaatagattttctataatcataagattgtttatcaaatgttaagaaatcaggtaatgaaacaactctagttggtacaccttgttcagttaatttctttgcagaatcaattgctaatgaaacttcagaacctgttgcaactaaaattaatcttgcatcttgaacatcataaacaatataaccacctttagaagctttttcaattgatgaattttctaattgaggtaaattttgtctagttaatgcaataattgaaggagtttcaattgattcaatggaaactttataagcagctgaaacttcattaccatcagcaggtctccaaaccattaaatttggaatggatctaaaatgtgctaaagtttcaattggttgatgagttggaccatcttcacctaaaccaattgaatcatgagttgcaacccaaataactggatgacctgataatgcacttaatctaactgcacctgcagcataagaaacaaaattaaggaatgtaccaccataagttttataattagcaccataagctgcaataccattcataattgcacccataccatgttctctaacaccatatctaatatatctacctttataattacctaaaccagtttgaggaggttggaaatcagttgcatcagtccatctagttaaatttgaaggagttaaatctgctgaaccaccaattaattcaggtaatgcttgttctaatttaccaagaacaatttcagacatttttcttgaagctaaaggtttatcatttgaagtataagttggtaataatttttcccaatttgaaggtaatttataatcacatcttctcttaatttccattgcttcttctggatattcttgtgaataagcatcaaataattcattccatttattattttcttcttcaccttgagaaataattttagaataataatcataaacatcttgagaaacagtaaaagattgatttggatccataccaaatttttcctttaattgtttaatatcatcaggtttaagtggagaaccatgaacaccagaagtaccttgattaagagaaccataaccaatagttgtagtcattttaatacaagttggtttatctttagataatttagccttttcaattgcatttgaaagagcagaataatcagtatcagcatttgaaacatgtaaaacttcccaaccataagattctaatcttttagaaacatcttcagtaaatgccatattagttgcaccatcaattgaaattttattatcatcatagaaagcaattaaattacctaattgtaaatgaccagctaatgaacatgcttcagatgcaacaccttccatcatacaaccatcaccaaagaaagtataagtataattatttgaaatttcataatttggtttattataagtagcagcaaaattagcttgagcaattgctaaaccaacagcatttgaaataccttgacctaaaggaccagttgtaacatcaataccaggagtttcactttcaggatgaccaggagttttactatttaattgtctaaattgttttaaatcatcaatagagatatcataaccaattaaatgtaacataacatataaaagtgcaacagcatgaccatttgaaagtacaaatctatctctattaatccattgaggattttttggattagttttcaaaaatttagagaataaaatatgagcagctggtgccatacccattggagcaccaggatgaccagaattagcctttgcaacagtatcaactgctaaaactctaattgaattaatagccttggtagtaatatcagacatggttgtaaaatgaaaatgaagaagagataattaatgaaaagcaatgaatatatggggaaatgacaaggtattttaatataagttttgatttcccaacatattgatattaataatattatgccaatgctagatttctttaactattattttaattattttaatggaaatgtgtcatccattgaaaatttatttatttattgaatatcgtcgcgtcggtgtcacgtgatttattggagatcacgtgagtattacgtaattgactcattgtattacgtaatggtattacatattacgtaatcaaacgaatatattacgtaatcatgataattttaaaaattattagctaatctatattatgtggggtaattcattttaaagtttttgatatttgatatttgatatttgatattagatattagacattgtataaaaagtattaaacatattaacaataaaggaacatcactaaactaataactaacaaatgacaaaattaaaatcaaaatcatcatcatcatcatcagtaaatacatcatcaaatacacgtccttatcaatgtccactttgtgataaatcattttcaagattagaacatagaacaagacatattagaactcatacaggtgaaaaacctcatcattgtacaattcctggttgttttaaaagattttcaagaagtgatgaattaactagacatttaagaactcataataataaaaataaatctactactaatactataaagaaacaatctaataataaattaaaaacatcaccatcaatgacattattaatgaatgctgcaaataatgaattaaatcttttacaaaacactaaacaaaatacaaaattaccattactttatacaaaatcactaccttcattaacaaattattttaatccaataccgaataatcaaattccatctaaattaccttcaattgaacgtatatcatcaatgactaatttaccaccacctgtatcattagatgatttaaaaccaaaatttcaattatctgatagtttaataaatactccaataacaactcctaaaatttcaccaaaattatcaccattatcattcactactactactaacattcataaattaaattagaattttcaatttctttaattaataattcacgacgatttaaacgacttgatcctttaccatttttactatttgttaaatgtgtaagacaatgacgtaaataacttagaaatttattaccattagtaccagtattattattattattatcacttaattttttaattttagttaattcaccacattcacaatatgcaaaatatttaaaattattatcataaacaattaattttggtaatggatgttcagttccatcagaataaactccatgatgttttgtaatatgatgtaaatattctgaatcattacgtccataaaaataatcattaattgaattatctaaattattaattattggacaatatggacacattgcttcaacaatataattacaatcatccttatttttaccaattttatacctcttttttctatttaaaatttcctccctattatattcatatccatccttacgacgttcccttataatgaaaggttcataaaaattaccaatttgtttacaataacgtaatggtaatgaattattattaatttcataatgtggttgatcaatataattacaataatatttccaatttgaatcattaaatttatttaataaaatattaacattttgaatattatttggtaattgatattggaaatattctaattgccattctttaaatggtaaaatattaaatactttaccttgaatactaattgtttcaggtaatttaattgaaattttttcaatattgtaatgattatattgattaatgtaattaattgcacgtaaaatatcattttctgtataaacaattggtttcctcttaattttaataatttctcttggttgttgaattgtttccatttcaacataatcatttccttctttttccttccctttttcatccccttcaaattcttcataaaaattataatcattactagtatcataaaaatcaaatttaatttctttaattttcttaccattattttgtaattggaaattctcaataaattcagttgattgataattcatcatattaattgtaaattgactaccattattaatttgattatcaattgaaagatcaattttatttaatttatcagtattttgatcaattaaactaatttcactaatactactattattatcacttttcttatcactatttggtgaaaaaattgtatcatcgggttcaataaattcacatccatttggatacgtattacctccattaggataaatatctttattattcatataaggattttgattatttgaattaattccattatacgattccattgaattttttacatcatcatcattcatttgaatatcaatatcaatattattatttacaagttcttcattaaattcatccattaattgttcattaacaagccaattatcattatcatatgattgataatgatcaattgattcaattaataattgactttgttcaaatacatcattattatcgaccatatgaaattggaaattaccaacatcatcatcatttttctcatcaatagtttcaatttcaattccattgtgattgttgtatagatcgtaatctataaaatcatcaaattgatccatgttattcataataatattcttgatcaaatattataattaacataaatcaaaaagagaaatcagataagcatgaatcaaaggtatcatttacacccccccccccataaactcttttattctatttcattatcaacagaataacaatcagaacagtataatatagttacatctgtactgttaaaactatcattagtttcggaacagtacaaaacaccaactccgaaaagtaaataaaaaaaatttttcatttttcattatcgcgattacataatcattatacttatttatcctattacttatcctattacttatcctatatacttataaaagccaacctttattctcaacttgtttccataatggtatactctcagctgcacctttgtatttaatacattcagctgatgctcttgttgcaaatttaattgaattttctaaattttcattacgataatcatttgttacaattgcacctaagaaagtatcacctgcaccagttgtatcaattactttatcattaatatcctctgatggaatataagcataagagaatgaaccctggttggaatataaaacaccatattcacctaatgtaacaattataattggttttgttataattgtacgtaattttgataataatttaatattcatattaacaatttcaataaattcattatttggttcaaattttgaaatattttgtaaaattgttaaaggatccctatttggatttgaatggaaatttttaactaatgtatttaattcagtttcatttataattatataatttgaattatgtaaagaatttaataattcattattaaattcagatcttttatttggtaatggtgatggattatagaaaattttaacatttgggtatttatttgagacataatttataattttatgaggattagaaatttcattttgaattatcattgaatattttaaatcatttgaaggtgcaattggtttaataataggattaatatttttattggcaatattatttaaaatcattgattgatttggagttaatgaagttgttgaagaatgagcagatgtaccaccaagtgaaaatgaaacattagttaatctattttgagcagttaaattaagatttgaagttggtctattatttaatgaaattgaaggtttacgttcagcaattgttgaaggtacatgaaggcttgtaatatcaacatttgaaagttttggagatggtgaataatgatttaaattattttgtgaaccatgagaatgtaaatctgatggaattgaatcacttgatctattatgaatattataattattatcattaattgaacctgtaattttagaagataataaatcattactaaaatttttatttgccaaattagtaccagaagctgaccaattatgaattaatgcaccatttttataaactaatgcatcagaggagttattacttgtacttgtattagctaatgaagccattgaaccatgagaatgaatatttgaaggaggtaaattatttaaatcttcagttttagccattttttcaccattaagtggtttagttgaatgagaatgtaaatttgaaggtaaattagtatcattaattgattcatttaattcagtaaaatttgaagcattgaaaaattcatctaattgatcaaaagtaacatcaaaatatttatttgcacctcttgtaattataattctattttcaccatttgaaaccatatcttcatcatcatcatcatcatcattagcactttcttgaacaataattgttgcagtacctgtttgaatattatctaatatagttaaattatcagttttaacattaaatttttccaaataattaataaatttatcttttataaaatcattaccaatacaaccaaataatgaaattgtaaatttatcatcaaatttctttaattttgcacaagcaattgcttcattaaaacctttaccacctaaatgagattcaaaagattcaccaatgacagtttcaccaggtgaagggaatttacgagtacgagtaacttgatcgtgattaagagaaccaaaaactgcaattggcatttggtttaaaggattgtagtagtagaaaagaagattaaaagaaggttcttttattaataaacatgccttattaaataataaattaaaattgatcattcattatcttaaaagatttattttaatgtcaccactgtaatatatcccacccctcttttattgaatcgtcatagtttcgtcattgtcatatatttatatattaggtaatcattattaggtaatcatgtcaatcacgtgatgcagtcgcgtctatttatgtattacgtaattagttgtcattacgtaatacgtattacgtaataagaaaaaattggttggtaaaaataacttacgtaatctattaacaaaaaaaaaattgttgggcggtaatgagccattatataatttcaacatgatttcttactataataatattattaggttattatctaatctattttaatttttcaattattatgttaattacaccgaaactgttttaaatttatataagaagtaagggggttcttattatttcatttcatttaatttaattttacttaattttttatttttcatctcttcttcttttactttccttcacttcctaataacaatggattctgttgatattactcaagccaatgcagtggctgcaggtactaataaacaaacaaagagaattgttgcttcaggtattggtggtcgtctgatgggtactaaagcaatgacaactgttacagctgaggaattagcaaaagattcagttgctgaagttttgaaaagggataaagaattaagattaaaatatgaaaaggaaaaacatattagtgaaaaaccttggacttggtcaaattggcatgaacatgttaattggctaaattttatgttagttttattattcccatcaattgcaatgggatgttcttattgggttaaaccaactttccaaactgttggtttaggtttattattattttgtttatcaggtttatcaattactgcaggttatcatagattatggtctcatagagcttatgatgcaaaagatccattgaaaattttctttgcactatttggtgcttcagcaattgaaggttcaattaaatggtggggtcattctcatagaattcatcatagatatactgatactcatagagatccttatgatgctaggaaaggtttttggtattctcatattggttggatgttattagttccaaatccaaaatttaaggcaagagcagatatttcagatttagttgatgattggattgttagagttcaacatagacattatttatcaattatgattttcatggcacttattttacctgctttaattagtaaatattttttcaatgatttttggggtggtttcatttatgcaggtttattaaaatcatttgcaattcaacaagcaacattttgtgttaattcattagctcattggattggtgaacaaccatttgatgatagaagaactccaagagatcatttcttaactgctttagttactttcggtgaaggttatcataatttccatcatgaattcccatcagattatagaaatgcattaaaatggtatcaatatgatccaactaaaattttaatttggtgtgcttctaaaattggacttgcatataatttaaaaaaattttcacaaaatgcaattgatcaaggtattttacaacaaaagcaaaaaaaattagatgaaatgagatcaaaattaaattggggtccacaaatttcagaattaccaatttggtcaaaggaagaatttaatgaaaattcaattaataagaaaggtttaattataatttcaggtattgttcatgattgttcaacatttttaactgaacatccaggtggtcaagcattagttagaacatcatttggtaaagatgcaacagttgcatttaatggaggtgtttatgcacattcaaatgctgctcataatttattatcaactttaagagttgcagttattaaagattcaggtgcttcaaataatacttattcaagtcaattagaatatttagctaaaactgaaaaacaacaactggaaaaatcaaattagttattttattaatactatactaaactaaactctttactacttttttactttactttactttactttacttttacaattcatttcatttcaatttatgattcattttttatttcattttatcattatcatcttattattattattataattattattacatctataaattacatagtctctctatatagtatattttcaaagaatatatcgatccatcttgtacaaattattaatctcggagtatagcccaacaaaaatttatcatctcagtcccaaaagggtaactcacgcgacagacgcgtctgcgctcttttattactcttttaggaaataagaaaacattattacatgaaaatatcataatcaaatatattcaaattactggcaaaattagagatcaaatcataagggttttctaactttgaatcatctttgaatcactttaaagtattgaataacgatgacaagtattgatagatgttattatcgtactattacaattgatccggaattaaatttaccattatatgtacttgatacgacttttctaccatcatcaataattaacagtaataatagtaataatagtaatactgatgaaaatgataaagtaaggcaatttatagatacattaatttccaaaatacccaattctgatcattcacttgttattttcacaaatggattttatcaatcatcaattaataatgaaaataaatcatctttatctgatgattcaagtttaaagataccacttcaaataattaaatttttaaaacttataccaagtgaattaaagaaaaatataaggaaaatattcattgttcattctaattggatattaaaatcaattattgaaatttattcaaaattaaatcttagtagtacaaaattaatccccataataattaattgtgagaatattactgcattatctaaatttattgatataactaaaataccaatctcattacatacttatatgattgataagattcaatataaaaataataaaattatattaagtagacatttaacaccaatttatagtcgtccattaacaatttattcaaataatatttcatcaactaataattacttaccattaaatcaattttcaagaatttataataatttaattgcttatttatctaataaatcattagatattcaattatctaaaactgattggttaactattattaaatgttctataatttcaaatgaaactaaaatttcaattgatattttatcagattgtttaaagagagatcaattaattattttatcagattattcatttttagaacattatatgattttagttaaattcatacttaaattatcaaattcaaatttcccacttataccattagatttattaattaattataaaatagattttaataatttaaaacaaattaatatatttttaaataaattattaacttatagacatccattaatagatttagataataatacaaataaagataatgttactactatgacgatagatagttatgataatgcatatatacttattaaaatattcaaattgtttaaatttttatcaattaaattagagaaagagacacatattttagaacctaatgttaaaaatcgtaataaatcaattgagagacaatcacttagactaatactttcatttactaaaattctttatactgataatgaagattcattaattaatgatgatgatgatgatattggttttgataatttatttaaattagttcgttcaattattgaaaattttgataatttaaaaattttcaatacagattatacaattgatgattttaataatcatttaacatttgatgattttattgcttttgaaaattttaaaaatcaacaacttggtattaatgatgtaattgaatctaaaattataaatccaaataaaaatgaaaataaacaagaaaagaaggacactccaacatcacctgttaaaccaaatagaataattgaacaaaatggaaatataaaaccacaaaaacttaattttaatacctcatcatcatcatctccatcaccaactcctccaactccaagaaaaaatcatttattatacacaatgaataataaatcagttgattctaaaagatcaatatcatcaagttcacaatcatcaattgaatcaatatcatcgaattatttaccaacttcagctgattcttcaatacctgtaactaaatctgaaattgaaatgattgcaaaatcagttgaaagtttaggtattgatgatgataataataataatgataatgataataataataataataatattgatttattcaccacaccaaaaagaaataatatctcaaatgatgacacagataatgaaacaattaatgatatagttgaagatttacttacaccaacacaaccatcaattatgtcgccaatgattcaaagacaaataaattcactttctacaaaatcttcaaatcaatcactttattctacaaatttaataaagaataataatttaagaaaatatactgaaaaagatttagcagttcaacaagaagttgaaaaggcaaagcaagctgcaagtataaaggaacaacaagcaaaggaagttgaattaggtgttagaaggggtgaacgtaaagtaagtagacttgcaagactttatgaagaaaaatttatgcaataaataatgaatattatgatatgataataatgataatgataatgatttataaatgtctataattatttctatttttttctatgtagcttttttatttttttggtaatgcattattgaattctctaacaataatttcacatttaacttcactacaaagagattttttattattatttgaaacatttttcaaaaattctaaacctgaagatttttctaatgattcaattggaacttcaaaatttcttaatggagtttcatttggtataatttcatttggcataacaaatgctgcaattgcaatatcatttgaattatttgatcttttaaaacttttctctgcaacaattaatttaaaaaaatgtgttggaactgcaatatttggtggattaccaatcatttcatattcaactctaaatttaccatcattacatttctttggtaaatataatggacctgtaataattctaacagaattataatcttttgtaagtcttctacaaaaatcttcaaaatgtgcccaataatctctattaaacccagttccaacttgtggtgacatattagttaaataaaatgtttcatccattgctaattgtgaaaattttgcatttgcagctggtgcttgatgacctctatcataacctgaacggaaataatcttttaatcttgcacgaaatttatcaggtatactttcatcttctttgaaaactgaatttttcctatcaccattatcaatgtttttactaatagaatttggtgttatatgttcaacaacataatatggatttttagtttgtctatcataaacactaacaaattcttgatgtgttgccatatcatgaactggacctgggaatccatatttgaaaaattcacttggatttatttcatttccagtattggttgtagtattatttgatgatcctttacctgatggaacaccaattggagcaccaccaccaattggtggaattggagctgatggtgtaggtgttgaatttgaatttgatgatccccaaaaaaataatccaccagataatgcagttgcaggtaatacaaatgtacttttaaacattgcaacggtgattgatagtgttgttaaagagattagaaagatcaaaaagatggaaaataaagatgttgaaataaggtgaaatattctcatgttgaaaaattaacgggttttttttcagccaatggaaatttttgttagtattaatatcaataaggttaggtgttcttctttccagtgggtttattatacttctattggatgtataatacttgagtggtttgaagagaataagtactaatgatggttgtagtttgattttaattatttgggtcatattatatagtatttcattctgatacagggatcaatgtgatgtatcacattttgttatttacatagtaaacatgggtgttaaatgacttatactcattcattatgtgatatatcatagtttttttgttgatgtgtcagatattgttctgaaattatggaaaattacttgataaagtttataatgttgagcctccaagaacgggtattatagttttgctacctgatttacagctatcaatagttgcatagcatatagaccaattgagaacattcctgtagaaaatatatcaacatgaaactctataaaggtagcatacaatgtctaaaataatgtttttgattcatctaagacaaatgtttcgaataagtatgttgaataagcaaataaattataatctataaacagaaatttgttataaatattagaaaaggggataaaacgaaagtaaagagagaggggatattgggaaaggtattgtttgtttcattggtgggagtgccataataataataaagtaaattaagataatagtaatcaataataataaaatacaaatattttgttccagaaaataaatgaattttaaaattattgggaaataaaagaactgttgattaattcaattgaaagaaaattgtttaatcttcgtctctgtagacaggaacttgtcttgctactggggcagatgatggtcttgaagcacctgaagagtatcttgaagaagatgaagtagttgatgatgatgaagagctagtggttgaactggtagttgaactggtagttggtaaaccagaacttggagctgatgaagaactagtagttgaactggtagttggtaaagcagagcttgaagttgttgaagagctagtagttgaactggtagttggtaaagcagagcttgaaattgatgaagagctagtagttgaagaggtggtggttggtaaactagaacttgaagttgttgaagagctagtagttgaggtagttgaactagtagttggaattgttgaagaggtagttggagtagttgcactagttgttggtgtagttgcagttgtagttggtgtagttgcagttgtggttggtgtagttgcagttgtggttggtgtagttgcagtggtagttggggtggtagcggtagtggttggtgttgtagcggtagtggttggggtggtagcggttgtagttggagttgttgcagtggtggttggagtagttgcaggaggttctaataatggtaagttagttgaagaatattgaacaactgtaacggtatcaatacatggtaaagtagctgcagttgcacttgttgctaaaagcaaagaataaaaaatagttaagattccactgcttttcatcttaagttttacttgttatataagaatatatagaagaaactatattagaataaaatttttaaaagacgaattcaaattagatgggaatttgtttaatttatagatatttagtagaacatggtaaagaattgtgagaattgaaagcaaatgatagtaatttaattaattgtcaaataattacgaatattaatatgttgataaaagaacatgtttgctattttcgcttaataaattgtccgttaattaatttaataatagaatgtttatctaaggtttatattgttctatttagagtactatcaacgattagtattagtattagtattagtttcggtgattataacattttcttattattattagtttactattccaaaagtaattgaatttattctattgcaattatatatcattacaatccatataccatcgctctacaattactgatggtatactcattaataacattaaacaatgccatgaatatataataaacaatgtgaaattataacattgactgttaaacgattaaattgctattatgatcccaaaagggtaatcgcccatattacctaatcaattttaagtgccactttaatatcaatttcgtctattattaatgttattggagtatatgatgattgtattcagtggataggagataggaatgtttgtatattgattacattagtattgtaaggtctggtggtatctaaagtttagtggggttagtttaatttagtttaaacttggtagatagcgtgggtatagctgctttctactctatgtatattacacaacacacgtaatacagtaattagaatatattgaatcccttttaaagagtaataagaacctgtatatgataaatataccttctctaactattgtgttaaaatagaaaacaaattaacgaaaaatttacgtgtagcatatagctattgggcattcttttacggaaataagataagataagttaattagggtagttgagccacctttttaaccatcattgatataatatgatttattatatttcacgtgtttctataacattaacaataaacaacttacagtatgctatgtgctattgccgattaactaaacagattcttatcaaatcaaataattcttacgtaatagtagttacgtaatacatggtgacatgaattttctaaatttttcattgaaattatttaatggagaatctgaagttataactgaaagggaagttttgattattgatctcagtcagggtaacaataacgttaaagatatatagatttatctttcaattatagatatggtgaatataatacggtataggagtttgcgaatattgcaatcatcattgagaacttcatatcgatataattcaacaattacacaaaatccattgaaaataataagtactttaactgaaggtaataataaattagaattggaaacaatttcaagattatataataaatatggtttacatctttttttacataatatgataattgcattatttgaacgacattctaataatttattagatttacaaaaatttgatattttatttaatttcataatgaaaaaatatttaaataatgttataaaagattcttgtgattatatatctccatcatttatagaaatggatttggaaacttttgaaaatttacaaggagatgaaaaattagagaaattgttattattattattaaaattatcacttagtactaattcatcatcattagcatttaatttaatgtttaaaattattgaaaaatcacaaattgatgaaaattttaaatcaaatataataaataaacaaaatatatcaacaattgttgatttattatcagtttcaagatctcaaagtcgaaatattaaagaattggataatatattcatattagtttcaagttttaataaatttgttgaaaaaacagatgaatcattaaaatttgaatttactgatgatcaaatattatcaattattgataaggctaaatattctattgaagaacaaacacaaacaaatactgatttaccatttgtatctgtaaatgtaaattcttcaccatatactaccattcaacaagtgataagacaattaggtttaataattagtaaaagagtatcgaaaacagtttcatattatgttgaaaaggaaaatgcaaatgaaaatgatattaataagactaccgtattggaagataatgatgatcaagaaataactaatgaactaggtaatgatatatcatcagatttaataaatgattataaagttgatgaacttatagataaacaattattaactaaatatttacaattttgttattttataatcaatgaaagatgtcaaaataatgatccaacagcagtttatataatatggacaacaattaaaccatttcataataaagtttacaattcaattattaattctgaaactaataatttatcaaataatttttattattatcaaacagtttcaaaagtaattacattatttagtaaaaataaacgatataattcattagttactgatttaatttatgatttaccattagattctgttaaagtttgccctgaattaatgtcaacaattatttatcattgtagtagaacaaataataaatcattagcatcaattgttatatcaagatatgataaaatttcacaagttaaatcaaatgatactactaaaactttaaatattcaagaattatttggtcaaggtggtgatttaacaattttaggtacaggtgaaaaatttactgcaggtcaaacacatgcattattagcatataatttaaaaattggtaataataaattagttttgaaaattattgaatatttaaaacataaattgattggatttacagcatctgattttaatgaaattatcaaaagtgttttacgaaatgaaaaagttaatgacaatgataatgaaaatgataatgataatgataaaaaaatggataagaaagaaattgcatgggaaatgatacataataatttcctttcacatgaaccagaattaaataaatatgcaattgttacctatgttgatcatatagtaactgaaagtttaggaaaaaatgaacctttaaatatgaaaagaattaatgaaatttatgaattgatggaattacattattctaagaaagatgttaaattttggaatcatttcaatatgatttattttaagtatattataagaaaatatccaataaatattgctaaaatagtttatttgaataataaaaaatttactaaacaaagcaattttttaaataaatcatctattgatattgaacagatttgttattttcaaaaagttgatgaatatgggttttataataatccatttaatacacattttaatgatgtaaggataaatttaaatgttagtttaagattaatgattttaagagatttttaccaacaatgtgatggatattttaaacgtgctaaatcattaaatagtgttgatttagatgatgctaggattcaattaaatgaatttgcagattggatttataaagaattaattgaaattaattataatgaaaataatgagaatttaaaatcattaaataaattattaattattgatttattaaggacaactaataaaaaatcacgtaaaattggtattaatattggtgattatcaagtaaataagaataagaataatatatcagattcagagaggaaatatagaattgaacaaggtgaaaaattcccaattggtgaaattacattaaaggaagaatttgatgaatcattaatgaaaaatgatgatatttggaaagatagattttccaaaaactagaaatatagatattaaataaatgatcttgtagtatatatatatatataatttatagatattaatgaatgaataataaatagtgaaaatgtaaatgtaattacatgattatgatcgacttaagggggctcgtcaaataatttattggctgattacgtaattatgtttaaatatcatcaattgtttctctaatttatgtttaaaatggtatatacccatattaaaagccttgaatatgttctaagtgtatactatagtgtttctaatgtagaaaattctgttttattgtagttttaaaaatgtaaaaaatgcaatgttggacaaatatctaggtaaatgttttagtttttaaaaactatttatactaaaagatgatgaatatacaaaatttctagtttttaagtcatataaacacatctatacataaaagagtactcccctaataccacctgatacaaaaaacactaggaataaccttaatacactgttatacaataagcatatatgataccacacaacagaaaacagtgtcataaatataaatataaatataaagataaagataaatataccctccctctaaatttccgagcatttcccctgcttcaccaaatttccgagatgaaaaatttttttctttgaagcagtggttattttttttgaaagtgaaattttttttttcattgaaggtgttattatatagaagactgattagttagtgaatttatatattattcttgatattcttttaataaccaaccaaacaccagccatgtccttcgtcttgactgaaaccgcagcgggttatgcgcttttaaaagcttctgataagaagatttataaatcatctactcttcaagcagatttagatactgcagaaaaagttttatcacaatttaaaattaaagcattttcaaaattttctaatgctgcaaatgcattagaggaagcaaatttaattaatgatggtaaagtctctgatcaactgaaaaaattattagaagaagcaaaacctgataagaaaactactttaattgtggatgatacaaaattagcaaattcaattaataaattaggtttaagttattcagttgtatctgatgctgcaagtttagatattttcagagctgttagagaatatttacctgaattattaccaggtatgactgataaagatttatcaacaatgtcattaggtttagctcattcaattggtagatttaaattaaaattttcacctgataaagttgatgttatgattattcaagcaattgcacttttagatgatttagataaagaattaaatacttatgcaatgagatgtaaagaatggtatggttggcatttcccagaattggcaaaaattgttgtcgattctgttgcatttgcgaaaattattaaaaaaatgggtatacgttcaaattgtgaatcaactgattttagtgatattttacctgaagaaattgaacaacaagttaaaactgctgctgaagtttcaatgggtactgaaattactgatgatgatttattaaatattcaattattagcagatcaaattattgaattttctcaatatagagatcaattatcaaattatttatcatcaagaatgaaggcaattgcaccaaatttaacttcattagttggtgaattagttggtgcaagattaattgctcatgcaggttccttagtttcattagcaaaggcaccagcttcaacaattcaaattttaggtgcagaaaaagctttatttagagctttaaagacaaaacatgatacgccgaaatatggtttaatatatcatgcatcattagttggtcaagcaactggtaaaaataagggtaaaattgcacgtgtattagctgctaaagcagcagttgcattacgttatgatgcattagctgaagaaagagatgattcaggtgattatggtttagaagttagatctaaagttgaaaatagattaagtgcattagaaggtagagatttaagatcaactccaagaattcaaaaagatatgcaaaaagttgaaattactgaaaataaatcatataatactgatggtgatgcaactatggcagatgttaaagaaaaggaagataaaaagagaaagagagatgttgattcagatgatgaagattcagatgatgaagatgctaaagtagttaagaaagagaagaaagaaaagaaggaaaagaaagataagaaggaaaagaaagagaagaaggaaaagaaggaaaagaaagataagaaagataagaaagaaaagaaagaaaagaaagaaaaaaaggaaaagaaatagataactatcatatctttacagttttaacttgatagaatatacattaaatttaaattaattaaaaataataaaaaaagtaaaagtactttaattatcattaaaatatttggaaataccaaaactactcttgctttttttatttaaaattcaaaattcatattcatattcatatttttatttttatttcatatttatattcatttttttcttacaattacagtctttattttctatatgttgtcaattacttttataattctataaataactcttatattatatgtaccttttgatgtgttataattattataattataacagcaaaataaatttaaaaatggaaaaagcgaagaaaagcaaatttggaaatttcacttttcgccaactccgtaattcatgatgggtaagatcgatctctgacacagggagtaagtagatcattaggtatcggttttaattagttaagtatatttcaataattagacaaaaacacttgttagaatgttttcaaatggtattaaactaacagatgaggatgaagttcctcaattaaatccaattttatctaaacatcataataaatctgataaaaatattcaaattgaacaattattaaataggttattacaggaaatggatgatgaaaataatgatattgaaaaattaaataaaatatttgctaatttatcagttaaatcaggtattgattataacttatggaaatcaaagaaaggtttaccatcattagaaaaggggaacattttcaacagtttctattacatcatcagatgaaatggatacttcaccagattctgattcatcaaatgatttattacaatcaattattaaacaaaggaacaatgcgaagaaaaatgttaattcaaatgtacctattgataattataatgaatttgatgatgatgatgatattatacgaaagaataaggaacgtacattacttttatgtcttttacatcgtgaaaaaaaattaaaagctcattatgaatcagttttggcatcttataaagatatttttacatatttaatttatgcaactaaatctagaagggaggaaacttatggtgtatatacagattttcaaaaatctaaaaagcaaaaatcattatcaataaattcaaaaactgcttcatcaatgaaaccaattgaagcaattcaaatatcaaaatctctgaaaaatcgtgatgatacatttaagaaaaatacagaatttttaaaatcattagcaaataataaaagaatggagattgaattaacaaagaaagcacttatagaagaatcaagtataataaatgatatcttaagtcaattagatgaatcaataaatgataataatacaactaatgaagtgaaagttgataattgattgggtatttgttttaaaaaaagctcaaaaaaaaggtatcttataaagtgttttctttatatatatattaatgtttttattctttttgatttaatcctgaacctgctggtcagataattcattattatcaatagaattattatcaattgtatgatcacttattttacaacattcatcagttttttgcatctccatttcagattttgcatataatttcttaattatcgttgtaactgtttgatttttatcaatttttttccatttttcttcaattgcttttgaatctgataatcgtattattgcacacataataaaatgaaatcctaaatatactaaaacatatggattatgccatatattagcccaataaaatttactccaatcaactgtaccatcttccctataatggaatggtgaacatactatatcactattatgattatctttatttataaggtttttagttatttctggatttatatctttttgaacatttaaatctttaacaagtttatcaattttactatttaatgtattaattttaaaatcttgtaatatttttaaattattttcaacttctttagttctttgtaataataatcttaattcatattttaatcttgcattacttttattagcatttttcaatttatcttcaagttcaaaaaatttactgaaaagtaaatttgcatcatgtcttgtattattgatttttaaagttttgatattattttctggattcattgattctaatacatataatgaatgtaattttaattctttactaacttcaaatgatttttgtaccatacttatttgatatttactctttaattttaaatatttcatagctaatacttcagaagttaaaaattcagatcctgaatattcaaatccataaacatcagaaatattaatctgtgatgacaaattattatcaattaatgaaaatgaggcacatctacgtaatgaaatattttcaattggtttactatgaataaaataatgttcctgtgaacaataattattatcaatattagttattgtattataactacgtgatcctaaaatactttgatttcgtttcataaattgactattttcaataattgatgaattatcatgtaaattttctcctttcatgttggtattatttttaaatttgtcaactccattcaatttatcatcaatacttttctcaacacacccatccttaatttctgaataattagtttcattattggaattaatactattcatatcaaagaaatctttcatatttttcttattatccacccaacttgtttttttctctaaaccattggaatttttattataactttcacgtttcattttcattttcatttcaattgaatatttattagcttcactatcaactattggaatactatgtcttcttttaagtcttttagaaaattgtaaatattgataatcaacagatttattactatcatcattataataatttgatgatgtagttatattactttgagttgataatgcagtttgattttcaacaaatttattattattattattattattattattgttattattattattattgatatttttaacaccattacgttcatcatcagtttgaattgaaggaactaatgattgtttccttgaatgttccttcatatcatctgaattacttgaatttttcttatgaggtgcctgatcatcaacttcataatcatattcaaatccatcctcatattcataaactccatcactatcaaattcattactattattcaatttatgaacactgttcattcttgaattattaccactaaattcaccagttgaaataacatgaggtgatgcaaaaaccgtctttaaattaccgtcattcagtttcttggaatttattctagttttactatacattgaatcagtgtcatcatcagttattgcttcatcaatgttgatcatatcattgtgagattttttagttaatctaaaatgtgatgtaaatgatgatcctctatcctttgatctactattatgacgtgtattactaccacttgatacataatcactatcaaaatcatcatatgtattagcagaatattgacctctatctaaactatttaatttcattgaatctgatttcccactagatgtggatttcttgtttggagtatatgttgatatatcattattaaattcttcaatataatcatttttatttttatgcctagtgctgttttttagtttactcttatattcatagttgtattcgtcatctgaacttaagtatggtggtgaaactattcttgaacttttcttaatatgctgattaatattattatcatcattatatgttaatgaatttgatttttgttcactagttttttgattttggttttgattttgattttggtatttttccctattttccaaactcatagaatttgattttgatggttttgattttaatttagttttagatttaaccctatctttagccttcgtagattcactatcacttacgatagcattttcataatcttttgaatttctcaccatcaaacagacctaatgttgcctgtgaaatatttttcagatcgaaaaatccatttatattagaattattatttaatggtggtaaatttaattgagatttcatctttttaacaccatcaagtactgaaattgaatttgttgaatttgctaattttctatttgcttcaactgctaaaatatttttagacatatctattggtttaccattacctttaaataaataatttaatgatttaccaagggtaaaatttgagaaatgatcaatattttgacaattaattaatttaccttgatcaaaattagtatgagaatgtaagaaaaatggtgaagcacttgcattttgagcaatactttgtaaatttttaccagatgtaatatcaataacagtatttttaacaatttttttcattttacttaaatcttttgttaaattttgtgaagttttaatactattcccccaatcaattaattttaataaagtttcatgattaaagcaagatgtttgttcaagtttaaaatgtttttgaaatcttaaaattgttaatttcatctgtttataatcaagtgaatcttttggtacaccaaaattattaccaccaatttctaataaatttctacataagattgttataccaacaatacctttaattgaatctgaaatattacagtttggaggtttatcctttaacatatttaaagccattgggatttcattcattattttccaccattcattaattgcagtttcagttttctcacagaataatccatcacaatatattggatcaataaatccataataatataagaaaatttgagttgtataaattaaatttaaaactgaataatttattggtattttactgtcaattttaaaagttgatttaaatttattttccattgatttggatggttcatcagtagttgcagctgaacgtgaaccacaacctaatttttttaaattataattaaccataaataatgtataatcatcactaatattaccagttttagcatcaattaatgataggaaaggatttaattgtgcaagattagtaataaatgcataacccatagaggtatcagttggaacataaaatggagattccaattgttctaccagataagaaataaattttaagggccaatgatcatacatattattttgatttgattgatttgaattttcatgtatagatgaaggttttttatcagatgataatgataatacatgatatgcaactattcgatcatttggatcaccagtatatgtaactattaatgtattatttgatcttgaagcaatccattgttcaacaaaataagcttcataacctaccaattcaaccaatgtaatttcaaatttagaattataatcaggaattgatctaaaatatggtttaattttatcaaatgcaacaatatcaggtattaaaaatgatttatttttaaagaaatcagcatatctattccaaggatttgatgcagctcttgaacgtgaatgagctcttgaagcgctgaccaccattagtcagtggggatacttagcttctgcatttaaaccacagaagacactcttagtcctggtctctaaacaacctcttcagaatgtgcatgcatctgttgttatcagattggcatgtaacgggaaactttactataaaaaatggcacagggttacgtaatcgggttttccaatggctgaggagggcaatttgcaatttcgtagaaaacaagtgtcctattagagagtaacaataaggtagtttaacactgattatccgtgtctctgcatagattagatcaattgaagagtgtaggagatagtgagaagtaatggcctcagagacacttgcagatgaggcgtttttccgtatgttattcacccccaattggcagatattttacatattcatatatgattatatatgatataacgatttgaatattaatactaacatataggtttcaatttcattggtatttttcatcaattgtactcttccaacctatatggagatgtacaattatggaatttatacttgtatttatcaatgaaatagttaaatactcctattaataaattataggctcagcggatatgtcccttgtacaattttacatcccaactgaaattgctcgtgaatgtatctctctattaggtgatatgggtgatattcaatttagagatatgaataaaaattcaaattctttccaaagaccttatgttaatgaaattagaaattttgatcaaactattagacatttaaaatttttaacaaatcaaatgaaaaatcaacaaattagaattattccagcagattttgatcatttaattaagaaaccttcccttgattatgaatttttcttaagagatgatgaaactcatttaacttcaggtcaaattgaggaattattagttacaattgaagctcatcaaattcgtacaagagatttatcaactacaaatgatttattgaaaaaggaaagagatcaattaatacaaaatcgtatggttttacaaaatactagacaattctttgattcaagattatcaattgaactggatgataatgattcattatttaatcaagttagattatcaactgaatcaactaatgatagttttatgatatctgatgatgaaaatgatctcattaataccccaattaataataataattctcaaaacaatattctcgaagcaggtacatttaataataataatagcaacaataaaatcttttcaacaggtagaaatgaattaaatattctaggttcaacaatgaactttatcagtggtataattgataccgataaatttttaatacttgaaaaaatttgttggagatcattaagaggtaatttatttataaatagtgttccattaactgaacctataacaaatttgaaaactggtgaaaaaacttttaaatcaattttccttattttcacacatggtgatactttgattaataaatgtaaaaaaatcatagaatctttagatggtgaattatatcaagtttcaagtgattatgaagtatacaaacaagaattggccgttgtcaatagtaaaattaaagatttaaatcaagttataatgcatactgatgatagattaatgatagaacttaaggaaattgcctcaaaagttgaaaaatggaaaatattgattaaaagagaggtttcaatttatgaaactttaaacttgtttaattatgattcaacaagaagatgtttgatagctgaaggttgggttccatataaggatacaaacacagttgctctagctttggaaactctcactaattcaattgattcaaatttaagtattgcagtcaatttaatgaaaacaaataaaactccaccaactttccataggactaataaattcactgaagcttatcaatcaattattgatgcttatggtattgcaacatatcaagaagttaatcctggtttagcaactattgtaactttcccattcatgtttgcaattatgtttggggatttaggtcatggatttattttatttttagctgctctggtactagttagatgggaaaatgttattggtaaaatgaaaaatagagatgaaatttttgatatggcttatacaggtcgttatattctattaatgatgggatttttttcaatgtatactggattgatatacaatgatttattctctaaatcaatgacattgtttaaatctggttggttatggcctgaaaattttaatgctggtgatagtattgttggtactcaatccggtgtatacccatttggtttagatcctgcttggcatggtactgaaaataatttattatttaccaactcatacaaaatgaaattatcaatcctcatgggatttattcatatgtcatattcattttcatttgcattagttaattatagatattttaaatcaagagtcgatattattggtaattttatacctgggttattatttatgcaatcaatttttggttatttaacaattacaattatctataaatggtgtgttgattggattgcaattgataaaccagctccaagtcttttaaatatgcttattaatatgtttttatcaccaggtacagtagaggaacaattatatcccggtcaaggtccaattcaagtcatattagttataattgcattgatttgtgttccttggttattactttacaaacctttaactttgaaaaaattaaatgaacaaaagataaaacttggttataccgatgttagtacacatagtactgaaaattctagattttctattgaatccgttccaatttcttcaattgatgacgattttgaaattaataatggtgaaatagatgacgatcaacaattattataccttgaagatgaaaatggagaaaatgttgaaccatttgaatttggtgatgttatggttcatcaagttattcatacaattgaattttgtttgaattgtgtctcacatactgcatcatatttacgtttatgggcattatcattagcacataatcaattatctgttgttttatgggatatgacaattgctaatggatttaaaccatataatgaagatggagttattggatcgataattgcatttttattatttggaatgtggtttgttttaactgtttgtattttagttgttatggaaggtacatctgcgatgttacattcacttagattacattgggttgaagcaatgtcaaagttttttgaaggtgaaggttatgcgtatgaacctttcagtttttacaaaattattaatcaaatgtatacagctgaattcgaagctgaacgtaaatagatagattttgtttatttaattattcctatttataaattatataatttatgttatatagatcgtagaaccattatgaacattcatttttttattaacatttctcaaaacggaaaaacaaaaacaaaaaaaaggttacatgaatctataaacattcttcttttcctagctacaacaatgattcgttctacatcgtatcatcaattgaaccgcaagagtgctgactctaaaaaggatgaaagattgatatcaagtaaactaaattcaactgtcaaagggagaaaaaaagatgttatagaaaaatatcttgaatctgaacatacagtgttatcaacaagtttaacacaattacgacatacaatcttatgtgaacaactccctaatccatgtccatatcgaagttatgtatggtctacgctattaagagctgctccagttgaaagtgaatggtatagtggtgttgtatctcgtggtccatctgatgttaactgaaaagattaagaatgatgtatttagaacgtttcaaaacaataataatttttggaataatgttaatgaagatgcatttgttagagttttaaatgcatatgcttggtgtgttgatgatgatagtgttggatatgttcaaggtatgaatgttttagcagctccaataatgtatgttgctaaaagcgaaccacaagcattttcattaatttatcgattatttaatacacatttatcaaggtatgttacaaaaactttattaggtgcaagagatggtgttaaattagtggaaattgttttaaaatgtgttgatgttaaactttacaatgttctgaaacagagaattgcaagtgctgatatgtatgcattaccatctgttttaacattatctgcatgtacaccatcattggatgaagttattaaattatgggattttctgtttagttttggagttcatttgaatataatggcagttgttgcacaattatgtttaatgagagatgaaattattgcatctaaaaatccaatgaatatattaagacaatttaaagaagtaaacgctgaaaaaattataaagttaacacttagtattacaaaaattatatcagatgatttatatgaattgattgttcgacatacttatgatgatgatgttagtagattaattgatcattattacattcagtgatttgtattaacactttttttaccagttgagaataatggtgatgactcaattcttttataatctagttcatctatatacccacctagaattaaccttccattgtaagttctaccacataatgattctaaacatgcagtagagttctttgcatcatcgaacttgatatataaacgagtgtactccggacgtaatgacatcgattgttggtttgaattctggtgtaggtgcaaccaacataaaatcaacaaaccctggcattttttgaagttcttcctcaaatgtttcaaatgttttattataatgaaaatcattaattgaatctgctagtgatattatgtttatcaattgaatggttttggtgatatcatgagctgtaacagtttcagtttttgcatcaacaaattgcctcaagttacgtagtgtgagtgtttctgattgtttatattttgaatgaacatggtaatgaaaaattccattttaaggtttttgacatttcatcaatgatttcttggattggcttttcactgcttttaaatgagaaaaataaagtaccatttgagtcatacgataatttatctaacaaacacacgaatgagtaaagattcccatattttgataaaatagaaatatattcttgtgttgaaagtatcctctgcattgtttgcacagataagtgatgttttattcataattacttcagcaggtcccgagtttgctgtactttctgtagatgttttattattatttatttcagtaacttgggtaaccttatttgcaggtttatcattagtttcaccagattctgtcttgagggtctcttcccgattatttgattcaccggtttccttatcatttgcaggagttttatcagtagatttaatatcttcactactactattgacaattgcatctgcaacatattcaggatgtctttcaactataactaccttttcaccaattatctttaccatttaatgacatcaaagtagttgcaatagtatcattaacacattcaacaactacaatatcgtctatttcttcaaaagttaaaccaatatcttcatatgatacaccaggaatgactgatgatgtgaggaaaatcttccatgtatgatctaactgaacttagtttaccatttttaacaactatcattcttgaatataaagcatttgtcaatggaatagatacaacaggctttgcatctttacgaacacgttccaaataagcttgtttatctaataactccttaatcttttcatcagtgaaatcttttaaaatatttgaagaagcagtgaaaagtccaaccgatttggcaaatcttgcagacataccttttactctatcaggaactatatcccataatgatgggatttggatatagtgttgctaatggaggagctttaaaattttgtctacgaccatctctttgtctattatcatatccattttgttggtatcgacgtctatcatcatttctacgagtgtctctctctctttcacgatatggttcacttctacgatcatcttgtctgtgaccaccgtttctataattggtgtttctatgactttcacttttatacctatcatccatatacctattatctctatatctattatctctatatctatcatctctgtatctattatcattttgttgttctcgtggacctcttggaggttcatttcgattatactctcgtgatggaggtaatggtgcatccatcacacctgatggttttgttggaacattggatttgttttcttgatatcttcttctacgatcgttaaacattgtccccagtaacccttagtttcaacctatatcaaaagaaagaactaaacaattgaagctttctttaagtttggaataatttttttattgtttctctatttttgaaaatttcatgtcaccaaaaagttcactttacttaacacatgtccttttcacgtatcgtgttttcttttaagattatatcaatcaaaggatcaattaactactaaatatacaatgaaattggcatacatactatcatttatagtggccgtgaatgctgcattacttggaatagattttggtactgcttatacaaaggcaattttagttgcaccaggtgtaaattatgatttactattaacacctgaatctaaacgtaaaagtgttgcctggtttagcaattaccaatgaaggagatgatattattagacactttgatacacaagcacaggcaatgtgtgtcagacgtcctgaatcatgtattatgggtgttaaatcagcattagatgaggaaggaaaagtgaatgttgaaatagctgcaatgttattttctgaattgaaaagaagagctgaattacattggaaggaaacaagtgaattagcaggtagtgttgaagatgcagttatatctgtacctgctcattggaatgcaataactagaagttcaattgttgatgctgcaagtgttgcaggtttaaacgtcattggtttagttaatgaaggtttagcagttggcatagactatgcacaacgtaagggtaataatgcagaagaattaatacctgaggaatatcatcttgtttttgattgtggtgcaggatgaaactaaagcatcattaatttggatgcataataatgtttcatcaactagtgttgaattagtcaatattgcaaacacatgaacttgttagtggtaacgaatttacacttgttgttagagacatgattttagatattttaccagaaagtgcacgtgatgatgctagagttatgaatcgtgtttggatgtcagctgagagagcaaagattgttttatctgctaacaatgaagctcgtgtcagtcttgaatatcaagatgttgattataatactgttttactccgagaagaatttgagaatagagttggtaaaaaagttaatgaatcaattgaaattatgttagatgaagtgttgaatggatttgaaggtgaattaagttcagttcaaattgttggtggttccgtacgtgttccacttgttcaaacaaaattatctgaatattttggaaatattgtttcaaagcatgttaacgctgatgaaagttgtgtttttggtactacttattatggtgcatatttattaggaattacaagaaagagaacagttgatattattccaagttcaattcatcaatataaattccaatataatgctggtaatgtaactgaaatgtatatggaaccatttgaaatggaacacgttgatgaaatttttgttaatataattgaaaatgatcaaataatacaaaatgttacagtcacagttccaacttttaacaatacagctgtttttggaatggaatttgatttagatccaattggtactgttaaaattgtttcaatgaaaatgaatgagacaagcttaccaatgaaatcaactcgtttaggaatgagtgcatccgaaaaatctacaatttcacgtaaactacgtgcaatggatacaggtgatgttatgcgtgaaactttagctgaagcaaagaatcaacttgaagctgcattatacgcattaagagaacttggagatgaagagtttgtcagtgaacaattagagtggttagaatatgaagatccaactttagaggaagtatatattagacgtgaagttgttaataagaaaatggacgcacatttaccacatgtagttgaagaagttgttgaagaagacattaaagaaactgttgaagaaacacttgatacagaagaagaagttccagaggaagcaccatctcatgatgaattgtaaacattctataaatttgtaaacttaagttaatattaatgctaattctgattaaaagaaaagggaatctatttgtaatgtgttctattatacactggatgacctgtgttgcaacatatcgtcactatttagcccactttacctatgtacacggtataaaatcatttactattaatttttttggatttacagtctaaaatataaaaggtacagattggaagggttttataacttgaaatacatcagttgaaacgtttgaaaacttagcaccatcaattttgttcttcttgctttttctaaaagacaaaaagaacaatcagtatcattaccaatgaaaaggtgttaaatattgcattgctttaataccatatttgaattagttaccgtagctggattttctaattttactatgggagtttggagtctaaaggttttgaagatgatgatcataatgagaatgatgaatgtgattttaagttaccaggtttgagaagtacggttgttattttaagcatttttgaaaactgtaatactttgatcaatgttgatatttgataaacgtttacattttaattcttgattaactgaattttcatactgactgataaattctaataattcagagaaggtgctgacatcttttgaaacagtgaacacatcttcagttgaaataacttctgaataaaatagatatgatattaattttcctctaaaagtaggatccattttagcaagaaatttatcaatcttttgttcctcagataaagaattcttaaccggatggaaaagtgataaacaatcaatatatgaaagtaacaatttaacagcattaacattattgtaattaaaaccataatttatgacaccgaaagcatcagtgacatctaaaaaggttttcctagaaccacagtgataataacgcattttttctaagattgcaaacattgtacctgaataatcaacaccaacagagttaacaaaatttcttctaccaacagctgttttaaagctattaagcataataacagtaaactcattaagagtattgttatcaattttattataagcatcttcatcgtttttttcaaaagcttgaaagacttttgcataatttttactgttatccatttttattaaagtttgcttgaaatataaataatatcttgcaaaattaccggaatcaggaaaagaaaaatcaatacctggagacataccaaataataatttaatcttggtgtctttaaataattgaatagatgatgtgtaaccagaaatatattagttggaaaaatttgactaacatcgtcataatttgcttcagaagcatctttatagttaacagagttgttgaatgacatctgtatatcaacttataaactaacttgttttttcttctggaaaatatttcctaaactttatctgacctaaaccttaattaattgataagcaaccctatattatttcaatattaaaggtttatcagccattttctaatttaatattaaaaatcttacgtaacatgcatgattaatgttaacctttcagtttcttttatggaccatagaatgacaatgattgacagtgaattattaggaccactaactactataacaaatatattatctagaagacctggtccaataaacttatcaggtttacgacgtgtttcagaaactcatgattttacaacattcgtagagaaaacaaaggaaggttttataagagtcagtgttacaggtgcagttttcgttgttgatattgatttagatgataaagaatcagttattgatgcaactgtatcagcagctggtgaaattgttgatgattgtgatttagttaatggatttggtaattacactatagcttcagtaatacttaaagatcttaaaaaatcaacattacgtgaatatagtgaaaatatacgtgcattacaggtatgggatgcattaggtgaaaattatcccttaaggttagcacaattatataaagatattaaattgaaattatcaaattctattactgatatagaagggaattcagatggtagaattggaatatgtgggaagtttaataatggtcaaagtgtgatacgtataaatccaaataatatagaattttggccatgcatttgggtacctgaggaagtaagtacattaataaatggatatgaaaagcttatatgtgattcaaatgataaatcaatgaagaaagttttcgaaaaggcagttcaattccgtggtgtattatgtgatacaaagagagtttgtataatttcatcaaagtttgttccaatagagatggtagattatcagaaggttgaagatatagttaaaatattggaattattacaaagttggcaaaatgtttcaaatatggttcaatctgcaaatctggatgaggaacctacagtggttgatattgatttaacaacaattgaacttagtgatgttttcagtgaagttcccgaaactaaaaaggaaatagaagttttggttactgtagctgttgatggatcagcaatcatcaaatgttaagcttattttatatatgataaatttataaaatatttacacaggtaaatatagccataactaaattctagtatcgccagtaaaggtttgactcttttcgaaatgatcaaatgccaacttcattttaaataataaacctgaaattatgaaattgcaaagagaaaatttagctagacttgttaatatacctattaaatctggttcacttcaaatgaattaataataaaattgaacagaaacaaattggtttttctaaggttaaaaaacaaattactgaatcaacaaatccgatagataaatctaatagtacagattcttctgaaaagcaatttggctcttttgaaagaagagttcaaaaaggtaatactttagaagtatatcaaaaatctctagatggtttaaggactccatatatgttgaaacgactagtaaattttatgttgattttaatgatcaagaacgaaatcaaggctcctttgttgatagaactgcattttatactaaatttctaaataaagaaaaaaatatcaaagatggaaatgataacaatattttatcagagatcgacgaagaggttttagttgctttagcaccggtttttcctatcattcataaaattaaagtagtcaccgattttagacagattaataaatctttgaaatttagaactgatgctatccatccaattcaattgttgattcagaacttgaatggttactttcatttcacttcattagatttgaaagagtgcctattttaacgttcctcttggataaggaatggcttcctagaattggtaatactacgcaatttggtaactttgaagtacataagattgcctttcgatttagctagtgctccatgcagtttttacaagatttatgcagtttgtcctcaaagacattcagtatgactcgaaattgcattatgttgggtgttatcttgatgatattatcattgcatcagttggtaaggattcacatttggaattagttgacaaaattttaacaatattagacaaatgcggattaacattgaccgctaaaaaggttaaattggctgaagattcaatcgagtttttaggatatttaatcaaagatggtaagagattcccaactgatgaaaaagttagtacaattaagaactggaaattgccaacaactatgaaagactggtataagtttattggttttgttaattttttgagtgcgttcattccaaattgcgctttattattgaaaaccattgtatgaacatcattcttgtttaaagtcaaaaacgatttcaactgtggaggagggtgtatcatatagaaattttgcccttattaaagaggtcttaattaattcaactggcttacaattatttaatccaaatgaaactctgtttatttatactgatgctagtgatctgggtgctggtggtatttttctgcaaaagtgggagaaggatcaaactaaattaattccaattgccttttattctaaatcttttaccacaacccaacagaaatatgcaacattggaacgtgagctattaggtatcattatggcattaacacataattacctattactttcaactgatattgttgttttcactgaccataaggccttggctacgattaatcaggtaaacggtccgttgaataacaacattttaaaatttttagagatattatcaacatatcctttaactattaaatatattcctggcaatactaattatgctgatttcgttaatcgtttttcaattgttgatcaaccattgcttgatattaaaaatattcaatagttgtgcaggttcgtgttttgtatatgatactcctatccaacctagaacagcatgtgtcccgttggtcaaatagagcataccctaaggaagacctcctaagaagaagtcatgccattcataaaggcaaatttgccctcagtgaaaagcaattccacaaaaacaaaattgataatattaggtaattcaaattttgctgataattttttttttttcactgataattttcattcatattatgattggattagaatgatctatattaacttgaatcaatgtttagattgagacgtcttttatctacaatgacttcacagggtaaacaagtaacttctattccaaatggaatagtggaggcagattatgatcttttgaaagaaggttctgcaacctattttgtttccaaaaaataatgtcttctataatccagttcaacaatataacagagatctttcatctttagctattcgtgcttatactgatattttacaaaaagaacaccatgcaaataaaagaaataaacaaccaataacaggagctaaaatcccacatagtgatgaaaagaaacatagaaaagtattagatgaaaataaggctgttgctacaactactactaatggtgaagttaaggaatctaccactactgaagaaacaaagacagaagaaactactacaacaactgcaccatttgttcatttactagaagccctctctgcttcaggtttacgtgcaattcgttattctaaggaaatacctcttttacaacatattgttgctaatgatttatctaatcatgcagttaaatctattcaacttaattgtgattataataaaactcataatgttaaaccacaagaggcaaatgctataacacatatggctacaacaccatctgcatatcatgttattgatttagatccttatggtacagttgcaccatttattgatagtgcaattaattcagctaaaaatggtgcattattattaataacttgtacagatttaggtgttttagcaggtaatggatatccagagaaatgtttttcattatatggaggtgtcaatgtttggggtgatgcaactcatgaaagtgcattaagattagttcatggtatgattgcacgtacagctgcaaaatacggtgtttcaattgaaccaatgttatcattaagtattgatttttatgttcgtgtatttgttagagtatggcataaacctattcaagttaaacaattaatggcagcaaatgaaatagttgttaaatgtagtggatgttattcaacaattaatcaacaaatgggtaaaatgtcaacaccaaatgaaaaaggtgcacgtaaatatggtttagctaaaatatcaagaggtgtatctgataattgtcaattttgtggatatacaaatcatttatgtggtccaatgtggggtggacatttacataataaagattttattaaaagtattttaaaattagtaaatgaagaagaaaagaaagatgaaagtgtatatggaacattaaaacgtgtacgtggtatgttaacaatggcattaaatgaattaggtgattcaacagcttcagaatctgatattcgtgattcacaattttattttgcaactacaacaatttcaagagtattgaaaattcctgcaccttcattagaggattattctgctgctcttggtaatttaggttatgatgcatcattagttcatgaagctgctaattctataaagacaaatgctccatggaatgttatttggtatattggtattcaatttgctaatagagctaaagttgatgtttcacgtttaagtacttcaactgcaggttataaaattcttacaaatgaatcaatcattaatagtgttgatattaaagatgctattaagaatgcaaagaaattaactgatgaacaagtatctgaacttgatgaagaaaaaattcatgaatggttattctctgcaaatgatgtaagtgcaaagattcaaaaattacgtcgtattaaaatcacacgttatcaagagaacccaacctaagaattggggtccaaaagcaagacctaaataagcattgtatagttgttaaatagttagaagttaaatatcaataatagaaatgtacttataatttgatttgatttcgaatcctaaaagcgtattttcaatgtaacatgaatatcagacattcacaagttgaaaattgtataacaggaaccatttattgttcatttatcaatcgattgtacctgagcgatttacatcataatcacactcaattgatataatgtcaacacgtacagcttttgtggataaggagatcacaattatagaggagattattaatatactggctaaaccctaacaaatatgggatatcggataaggagatgttcacagttctgaatagttcatcatcaatgcttgataatatcatcaatggacctaaactttcagaatctccatcaaataatgtctctacgaaaatgattgattttcaaaaatctagttgctttaggtcaattattagctgataaaagaaatataatcaatacattcttcatctacaaatccaaataagaatgtcgatgatatgaataatgcagttagagtattaaagacaatttatcaaacattgagtacaaatgtttatattaatcatgtgaaaaacaccttcagtaagtgcagctgtttcagcatcagctgctgcttcgggatctacatctacaagttggtggaatataaataaggctaatttacaattaaccaattcaactgatggtagtataatatcaagtacctaatccacttgaaagtgttgattattttccagatttaagattggtcttgaaaaatgttttagtactgttcatttcatttttgagaagatatcaagatttaataaacagtattaaagaattatcagagaatgataaatcattgattgtttcattgcgtgatttaatgttacttttgaatgtatccattttgaataaattagttgaaatattcaaaatgttgaatcctaaattatcattgcaatctgaacgtacaatgttcgatgtttttaaataataatacattttcattttcattattttaatactgttttataaaagttatatttatacatagacacacatttcaagaaccccaaaaccatccggcaaaaatcccccatacacgatgtgcaaaacgacgtcctaaaaacttacctgcaagtggaatcaaaactaatgcaataacaatttgtaattgatgaaccatattatcccattcttcattattgtttccatcactagaataagtataaactgaacaatcatcatcagtttcatattcacttacatcacttgcattttgagttgttccttcattatttgtacttaatgagttcttttctttaagcagttttaattgagctaactttgcaagtcttcttttagcttctcttttcaattcttcatccttaattttaatcttttcaaattcttcagatttcttttctgcttgtgaatttgtatcttctttgtcatcttcgctgttggatgggattgatgctgattcctgtgaatcttcttgaacaatttcatcaatttcgatattttgtttttcagcttcaagtttactttcttcatctttctttatttgttcctcagtttctttgattgtcttttcttgttccaatctttcttcttcagctttcttagccttttcttcatcttctaatctcttcttttcagcttctttagctaacctttcatcctcaagttttttctcaagtgcttgtttagctaatctttcttcttcggtctttctttcttcagcttctttttttaatttttccttttcaattctctccttttcaagtctttcgttttcaagtctttcgttttcaagtcttttgttttcaagtctctccttttcgagttttgcttcttcagcttcttttgctagtctttcttgttcaactctttcttgttcaactctttcttgttcaattctctccttttcaattctctccttttcaagtctctccttttcaaatctctccttttcaagtctctccttttcaagtctctccttttcagctctttccttttcagctctttccttttcagctctttccttctcctctctttccttctcctctctttccttctcctctctttccttctcctctctttccttgtcaagtctttccttgtcaagtctttccttttcctcttgttccttttcctcttgttccttttcaattcttgcaacttcagctaatcttgcaattatagctattctttccttttccagtttttctttcttttccttctcctctgcttctttagccaatttaacctctttagcttttttggtcttttcagaaactttacttgtaccatcttcatcaactttatgatcttggctttcagcttcttgactcacattctctttttcatcaccttttccagttaaatcaattgccttctcgctatccagatgtttatcagatacatcttgtttattaccattagtctcggattcatgtaaatgtttggaatttttcaatttacgttcatgttctctatgttcccataaatcatcattttcatcatcttcaacttcctcctcatgggcaactttcttcagtttatccagtttactcagtatctgttgatcaatttcaccaggcatggttcgattacactaataatataaatcaaagaaagtatactttcctatccatcaatacaaaaaactcggcttaatttgacatttcaaaatttcatgtcctcaaattttataaatgatttcacttctggaacttagtttaactttccttttatacaacttcttttttaattactctacaaccaattgagtatattatacttcacaattataatcttataaacatctataaagtatcttaccaatttgaaaatccaaaaattaactcattagctttcattatatctagttttcctctttccctacattcatcttggtctttctcttcttgatcatcctcttttttctctctaatcttcttagcttctgcggtttcattagctggtacagaaaattctctaaacaatgcctttttctcttttcttaaataattttcttgggttgtaaaatcacttattttttcaagaacttcagtaaacttgtcggcagttgctttcccagttttatcatccatactaaataatttggaaattaaattttcatttactggtacttcttgcctcttctttgattcaacctttctttggctcttgctttggtgtcttttgatcttgtttattacttgttggtttgatttctttcttattattattattattattattattattattattattattattattattattattattattatttttcaccgttgtcttggattccaatttcccagctgtccttgagttttttttcatcttctagtttctgttgctccttgtaatattgtgttcctcttgcttttaagtattgaaagttttcatcacccattttaatttctagactaggaaagcaaattacttgattaaatgcaaacatttctccaaaatgttcaagctccatgttaaaatctacatcataatcatcttgaagtctttcttgaactaaatcctgataagcttcagctaaatctctttgaagtgattcttcagtatatttggcgctttttggcatagttaatttacctttctttgacttagcattggatccagattttttagcttctctttcttccttgtccttgctggcaaataatgcattaagatgctttttaaattctggatcatcttctcttgaatatggttttggttgagcttctctgactttcttctccatcattgctattgtttcattcttttcacgtgtatttttattatcaattatcttttgttcattaatctgtgttgttaaagtgacagcagtattggtggacttactaccattttgagcttgcttttgttctgctaatttaagtttttgttcaagtcgtttagcaaagccatcagctggatcaggttctgattttttaacatcatctgcttttgttgcagttttggattcagactttacaggtgtttttgttgattgagaaacaggtttagctttctttggttcatcaaccgttttagctttctccttttgttcttccatttctaattttttggctaatctactagcaaaactatcaacaattttcttggatgaattaagttctttttctttctttgcttttgatttcatttcttttttcatttgtttttccttttcatcatatctcatagtcattgcttcaacttgtcttgataaaaggaatgattgttcaaattttttagttctttcatcatcaaattctgcattaggatctaaaccataaagcatattagccatttgagatgaattcaactcatttggattttcattttcctttgatttactgttgctcatacttagttaactgcgtttatgagaagatccaatgaagaaatacgtttagtcaatcttcaatcaatttagaaagattgtgacacgaaaaattcatgaaaaaaaattgaatgtcgccaaactctgaatttcatttacttcattggttaaataacaatttatttaattctatttctatataaatggtttaaaatgaacagttataaatacgtgtattactataattaataatcatcatcagtgaattctattttagattgatgttgttctaaaatagattctcctaatgccatttgttcttcaaatgccttagatttgaattcctcatcttccttttcatcagcaattttttccttttcttctctaattttcttagcttcaacagtttcaccactatgatcctctaaacttctcatatattttcttctatcttttctaatatcatcttgttgtttctgaattttccttaatctaacaataccttcatgagttccacctatgatttgcattttaatttcattatctcttgcatttaactcatttaatttactgaaaatgatttcatcaatttcatcacctgttttcttaccatcatatttctttataattctatctgaaattatgtccattcttttttctatactggcaacagttttattttttgcttgaggtctcttgtccggtgttgtttccttttcaggggttttttccttttcaggagttttttcctttccaagagctttttgttctactagagctttctgcttttcaagctctctgattttattttcaatttctctttgcttttctaatgctttttgcttttcaagttctctttgtctttcaagttctttttgtctctcaatttccttttgcttttccaaatctctttgcttttccagttctttaatctgttcctcaaattccttttgtttttctaaagctttttgtctctccaattcttgttgcttttcaagagctttttgcctttcacgttcttttttcctttcaattgcttgtgctctatgaatttgcatgagttcttgaagttcatcaaaacgatgtttgtttttttcaaaaacatatttcttaattttttccaattgttcacttctttcctttgctaattttttattatctaattcatcttccttagcatatcttgctaaccttttctctttctccccttcagtttctgaaattgatgcttcaagttctcttgtgaatgatttttcactttccattgtggcttttttattttccataattttatctaatttcatacacgcttcatccatatcaagtgccatatcaattttaatatcttgttcagtatcccagatgatcatttctctttttaaaaatgaaattttcttagatttaccaaattttggaaaatcatcaatcacattttcaacatctttacttattttctttgaaaaattttcataatgttcaagtaattcatcttcattattaagatcaatagttttatcagatggttgaccaaattttttaatatatttaagagcatattgagttttaaatcttttttcaatatcaatatcaacttcttctccttcatcttcatcttcagtgtcatcacttgcatcaaaaaattcatcgtcttcttcaactacaattttattaaaaccattatttgaagttattggttttgtttcctcaacgggcttaatagttggagcagcaccttgtttcgttgttttttcctgttcttcttctaatttcaacttcctctctaatctttcagcaaaacttaaacctttagatttattaacaggtttgatgttttccttcttattcttcttttcttcctcttctttcttcttttgagctgctaattttgcctcttgttcagtttttcttctaatatcttccactcctttagctaatctagcttttcttgcttcttcctcattaacaatagtttgtttatctttaattggaatattctcctcacccttctttctttcttctactgatttcaacttattagtaagtcttgtcgtaaaactacgtgtcatctcctgtattgaactcatggtcaatggccactactttaattaaaatgagccgtcgttgcagtataagtagcaaaatgtccatttcatatttttttttcaacacacgaaagttttagcttaaagttacttacatgattacataagactatctactacatcttctcttcctttgcacgtctctctttattaatctgtatagttctttccttatcagatttaccaccattattaacagataatttattaaatcctaaaccattatcaatttcaccatcttcttcgtcgtcttcttcattattataattataactgtaattatttgatgatttaattgtcatttttagcatatttttaatatctcttgatttatttaaccaattacttaattctgatccaagtataaattttaatacttgtatacgaatatatgaaaaccatgaacttacctttaaattctttgattttgatattttaattgaatctaattcatcatcatcatcggatgaattattcattgtatttaatacttgtttgaaaatattttttgcatctttacccttcttaccaatttttttactaccttcattagataatgtttgtatttcacctttaattaattcaaattgttcattaataaattcatattcttcatcagtggtatcttcctctgattcctgttcttttttaatttttgtattaaattcaattatatcataacataatccaacaattacacttgcaaccattttagtttcaattttatgttttttattaacaagtaccaatttaatagtttctaaaatttgatcttcaattaattcatcaacatttctaccactttcccaagctaatgataatgaaattccaatcataaataatgaacttttaattatattatcatcaataattaaatcatttgaaatataatttagaaatattttagtatattcaattataccataattttcagaattaaaataaataaataaaatacatgacattaatgaccaaattgataaatcaattttcttatattcaattatactaactggttccccttccaatgaatctaatttacttataattttaaataataatggtaaaacatattcaataacttcacttgaaacttcttcattacccatacaactatatgatataatacatcttaaccaaatttcccattcaaatgaaagtatactatcagaactttcctcaccaccactacttttaaaactattaattaaacttaataaatcaacttcatttggtccattaataccaaaataaatttcattatttgaactaattgtcattctatataaatgtgataataaaatttctctctcaatttgtccaatacccaaacgagttgataatctactcgatgatgttaaagttttaattatttcatcaatatcatataatttattataatttgatgaattatttctatcactttcattatcacttgaatcaattggatcaataagatttgataataaactattttgtcttgattctgtctttgataatattgattttaatgaattattacgttgttcaataaattcattattttcattatttaaataattatttaatctttgattaaatattaaattaaaatcatcattagtattacctgttttctcagtactgatactacccttgtatatatccctacgtaaatttgacatttgtccttaagaagaaggacatgtagttaggtattaataataaattatcgcactatataaaattacgtaaagctatttatttatttaatatcatgagtttccaatggacttatactttcaatacctgaacttgttacatttgtatttgtctgattattatcaatatttaataacaaattcatatcattatctttattatttaacattgttaataattcattaatatatttacaaccaagttcaacagttgttgccttacttggtacagttataccaattttcatcttttcaggtattaatttatctaattcttgaattgcaatattcattctatttcgacgtccctgttctgctaatttatgtgacatttttttatcaattgtttcattatttgatggggttggtattggtggaattataggtcgatttgatgataagatacttgtaccaacaggtggcattgaaattgattttttattagaattagaattaaagttggatgatgatgatgatgatgatgatgattgtatacttggtggtaatgaaggattagaatatttaaaaattggtgttgatgttgtacttgattttttaactgttgaatttgaatttgatgaagaaattgatgatgttgtactttcaggtattttaaattcaaatttattattattattatttttctgtgattcaatcaataaatttgagcttgatgatggtaatataactggtgatgattgagagtttttattatgattggggttaattaaaacactattctttttattatataaaatatttgattgtgaattattatctgaattatttaatgaaaatgattttgatttttgataaattggtgattgttttgtaataaaatcattattactattaggtggaggtggtaatgttaaatcactatcaaaagcatcaacaaaggaattatcactaaattcattatttgaaaaagttttaaaagaattagtagaaatagaactttccttggattgtgattgtgattgtgattgttgattagagtatgtatttgaagttgttttgaagatataagtttggaatggactattagttgcagtattattattattattattattattattattattattattatttttagaaatagatttccttgaatctaatgttgataataaaggagttgaaattggagttttagaacgtttatttgaatttaaattctcatcattatcatttgaattatttgctgtgttgtcgttagtactattactattattattactattacttttattattattatgattatcattaatatcctttcttttctgtcttaaagttgaagaattattatatttactatgactatgactatgattttgattttgattttgattttgaaattctaaaacaggtgaagaaagaggtgaaaaacctgatttacccttatttgaactaactctctccaatgaaggattaatcattggagataataaaggtgtaaaatcattattaagattagttgtagtataaggatcatttgttggttgagtatgttgtaacataaaatccaaattttcagctgtcattaaagaatcgaaatgaaatttattattatcaatattgttatctgtatgattattattatgaatattttcattattattacttataccaatatctaaattacttgaattaaattccgatatataatgtaaatcagaccatttaaaatcatgtgaattatccatcatttcagtgatagttactggaaagaaagaaagaaagaaagaaagaaatgaagataataattgtatactgttagtaatgataataataatttattataagagtcaaatgtcaaaagattaaaaattattatctttccaatttggggaagtcaagcgacagatatagcacacgtggggggtttcccttttaggaagtatcaaggagatctaagattttattactgtatggtatagtatggtagtatcataatacagcatatacggcagtattattcttcatattgtatataccgatatagtagtaagacatacatacatacatacaatacataaaggaaagaaagaaagaaagaaagagagaaaggaagaaagatacaacaatataaactgaaggggatattatattaaagattgatggctcatctattcttcttatcttttcttttctttcttttccttttttgctattgctttcttttgtatttagtatgcagttattataagtatgtactgtggtatagatataaatgattcaatccagtgtaatatatcatcatattatcttaacacacaatacactaccatataataataataatccattaatacaccctgaataatactcagctgagccatgaaaaacaaaaaaaaattaaaaaattaaaaaattcgcgagcttctcaccatttcctatttggtattttgtatactacatgtgaatttccaatgtttacaatctgcttttatagacaatgaacttattattattatgtcaatagaatacatttatattatatcttcttatataggttcatttttattcttattgggaatatacatatctgcttttttccatcatttgtttcataaaattatagggaaaaaaataattattcatgatcttgaatcattcccatattctcaaaagaaagcatatcctgagaataaactaataataactgatgatttaagttattatgctaatttattaggtttaaaattagatacttttgaaattataacagaggatgggttttatataacattaaatcatttatataaatctacgggagaagatactaaggataaataccctattttattattacatggattaatgcaatcatctgcatcatttttaacttcaggtactaaaagtattgcatatcatttaattatgaataattatgatgtttggcttggtaataatagatgtggatttaatccaaaacatgtgaaatataattcaaataattatcaaatgtggaattgggatttaattgatatgagtaaatatgatttaccttcattaattgattatgtgatgttaaataataattataaaacattatcaattatgtcacattctcaaagtacttcacaatgtgttttattatttgcaaatgattttagggataataataataatgataaatataataaaattattgataaatgtgttttatttgcacctgcaatttatggtggttcattattaaatgaaaaattatttattaaatttattagattgatacctgattggttatataaattatttttcggaattaattcatttatgccaattttagttcaattaagaaatttaacttataaattaaaaggatttggattttcatcttatattgtattcaattatttatttgattgggatgatcaattatgggatgatgaaatacgtacaattcatttccttttcagtccggtttatgtttcaaataaattaatgaaatggtggttaagagataaaaatggttttggtaatggtaaatcaattattaatagagatggatattggtttaatgaaaattgccctaaattactgttgattattggaggtaatgataaattagttaatggtgatttatttataaatagattaaaatataatgaaccaaatatgttagataattggcaatttattaaaataaatgaatattcacatttagatgtactttgggctgataatataattgataaaattggtgataaattgttaaattttttaaaatcatagaaaataaatatatgtaatatgtaatatgtataaatatatatatataagatagaataatattaaactatagtataaaactaagcagaattctttttagctaaatcataagctttttcacttgggaaatgaggatgaattggtttaaatatttgattaccatctttaaaaatttctctaccaccatcacctgggattgatttagctaaattaagtgatttaaatacacaatcatttaataaactttcagcttttctacaatttttaaattccatatttgaataattaagacatttataatgcatttcaaattctttcttacaatgagcatttaaatctgctaaaacacttgatgcacatcttgtaactttacgaccttccttaaggcaattaactgtaccatttgaaccattttccttttgacaaagcataaaatcatcattgaaatctttacatctatcttgaatgaaaaatgatgcacttaataatggacctgtagttgcaccaatttctttaacatgtggaatttcttctggtaatttatcattttcaaaaacatattgagtatctctcttcttatcagtgaagttagaagttgagatgttatcgtatgtattagatgtggacattgttctgtgttgaaagaatatataggtgatttcttagtggtttataaactaattccccactcttaggggaaggtttaagaatttcatgaaattttaaagagcgggtaattatctggctcattaggatattttatatcacttctcttttccctggtttgccactgttcgtttctcttgaaaccatgctggaattcacagcaattggcactgatggatctcaggggagacttttacaactatatgatccaatatccgttgatgaatccaatttacatgtaaatatcttagctgatccaggttggaatggaattgataatattgatgaaatttatacacaatcattaattgattcaattgatttaattatactttcacaggcaactattgaatatattggctgcctatgctttgcttttgaataaatatcctcaattatgtgatataccaacttatgctacattaccattatgtaaattatcaacaatttcaatattagaaatgtatagatcaattggtttattaggtcccatagattcaaatttaattgaaattgggaaaattattagtatattctctcaaataaagactcttaattattcacaattaattaaattatcaaatattaataataaacaaattaatttatcattaactgcttataattcaggttattcaattggtggttcaatttggttaattgaaattaataatgaaaaaattatttatgcaccaatttggaatcatgcaaaggataattttttaaataattgtccattatttaataattctgattttattagaccaactacattaattacaaatagtgaatttattaattcaaaattatcacatcaattaaaaattgataaattaattgatttaattgataaaattttaatttcaggtacaaatgttgttttaccaacttcaatttcaggtagatttttcgaattaattatacctttgttaacaaatttgaagaatgattcatttatttatattattaattatacaggtttagataatatgaaatatttatcaaattttcttgaatggatgaatcctaacataataaaattatgggaaaataacaataacaataataataataataataataataataataacaataataataccaataccaacaacccttcttcaacgatatcaacattagcaagtaatagaattaaagttataaaattaaatgaattaaataatttaatacatacaggaaatagacctaaaatttttatagttgatgaaatgaatatgattgatgattcagtttttaatcaattaattaatacagttaatgcaacattaaattattcaataatattaactgaaccaccaaataaattttctaaattaaatgatttttataatgtttggaaagaaaatacacaatcagaaatagataatgaaggttcattaattgtacttaaattatctaattatgaatctaatatatttgaagaaactccattaagatcaaaggaattatctaattatgaaaatatgataaatgagagaagatcgttggaaattagattagagaaggaaaaattggagaagaaaaaaattgaagatttattagatgctgatgttaaagaaatatctgatgatgatgaagaggatgaggaggaaaatgagaaagagggtgaaccagatgataataatagtaatagtataattagaaaaaatcttgaaataactaccaatattattaaggaagccgaagctaaatatcaatttgatgaatcaaagatattgaaaattgataaaatattaacattaccaagagattttaatgtatcaaatcttaaacataaaaatagagttttccccacagttattaataaatttaattttgatgattatggtattttaattgatagtaaagatttccaaattttcgataatgataaattcccaataattggagaatttaatgaaaataatttaaatgaatctgaatcatcagatattgaaattattgatgagaatgataataatagaaaaagatcacgtaggagaaatggtagggataataaacgtaggaagaataatattgaaaatatattagataataaaataactacaactaatttattagattcacttaataatccagtttctagaacatatacaaaaaataaaataaatattacatgtggattttcatttattgatttaagtggtaatcatgatttaagatcattaaaatttacaattaagaaaattaaaccgaagaaaattattatattacctgaaataaggaatggtgattcaagtaaattaattaatgaattgaaaagtgataatgatataaataataataatgaaattattaaatgtaaattaaatgaaatgataaatttaggtaatattataacatcatttgatttattacttgataataaattaataaataaattaaaatggaagaatttaaataatgaatatatgataactccaataaatggtatacttgaaaaatctaataaatgggaatacaaattaaaatctaatgaaaatgagacaattaatacatcatcacagaatattaaaattggtgatattaaacttaatcaattaaagattaatttacaaaatgataatcataatgttgaatttttaggtgatggtagattactcattgatgaaaaagttatagttgcctaagggtaatgaaggtaagttatctattgaatcaaatcttgatccattattttacaaagtgaagtcttctattgagaacatgcttgccaatatttaaaaaaattttaaaattaaaatgtacaatatactttataaacattaattagaaaaaccatctataaataagcaacaatacaaccaatgcaacaactgctaatggagtatattgtttaataaacaaatcccaattaatcttctttgcatatttcttatatttaaaactttgttcctttaatgaatttgataaatcttgtaaattatttaaattttcacctctatttaataaatcatttatatttttattcattatatttttaacatcatttaattgattattaatatcatttaatccatcctttgctctactatctgaataaattttcttacttttactaataaaagtttcaaatgacataaattgataaggtctaataatttcacctctttccctaaaactagtaatttcatttttataaatatgattaaattcatcttcaatttcacttaaataacttaatgcaagttgatttggaaatttatcatttgttataacaattattaataaatcattttctttatttattttataatgaatacaatatggtttactttcaatattaccaatatcaggttcatgtggattagaaatttttaaaataattggttttatcttctttttaagttcaattaattgagattctttaatatcatcagatgatgcagcaagtggtgtcgttgtagacagttgatatatcgttgttgattccattgatctatgttgaataaaaaaggaaaggtgtgtttatttatacgtggtgtttatttaagcaacatgaaaatttaaatgttgaggaatttagtaaagtatattcttactactttaaattactaaatataatatattttacataaaattatctaattactgtgttaatttcattaactttgcttcatcctctgccattaattcacaaagaaattgtataccatgttgttgtttagctaagattttcaataatcttttaataacatcatcagaatcattttcattattttctttattatcattaatatcaatttcatttaatgatttatttaatgatgcactattatcaggatacttatcctttaaatttgtaagacgtgcccataattcattaactctacttaaaccaattggatcatctaattttgataataaatttttgaattttaaaattaaaatttcttcatcatttgttaatggataacctttaaattttaaaattgataaattaattgcaattttcaataatttaatatttaaatttctttgtctcattttacattttaataattgagaatttgaatgtaaatcatgtttttcatttaatttaattaatttatcattaatttcatttaataataatcttgtttgtttaacatgattatcttgtaattgatttctttcaaataatcctgtaaatccaatacatttaattggaattgaattatattcctttggtctatttttcattgcattttcccattcctctggagtttcatttaatggtcttgtaaaattattaaaagaattatcaactttattatataaatgtgtaaccattgtagattttggattattaccatcccatgatgatttaattttaattaatttatcattaattgttggtgtataatcattttgagtatgttgttttgattgattattggatgttgttgattgtaatggttgtattggttgtattggtgcctgttgttgttgaggttgagttgtttgtccaaatgtagtggtattggatgtattatttgttgaccaagggaatgaaggttgtgaactaaagttttgttgtaggggttgggcttgttgtgattgtggttgttgttgattttgttgtccaaataatccaccagttgaaggttgcgtatttgaagatgttccaaaagagagacctgtagtagtagtagtagcaggagcagattggttttgcaccaaatgaaaatccaccaccggtagttgaagcagcaggagcagaaggtgttgaagatgaagtatttaatgaaaatccattagttgcaggtgtagttgttgatgattgatgatgaattaccaaacccgaatgatggtgttgtatttgttgttgtattagttgttgcaggtttattaccgaaaccgaaagaaggagtggaagtagtagttggttttgcaccaaatgaaaatcccgtagattgttgtgtctgtggttgttgttgttgtccaaacatagcacagatggttattatatcactacttcccaaaagaagaaacctacaagaaatcaaataaattcatgttaatgttttaaaatggaaatttgttggaacattaacatgttacgtaaggtttttcatattataaatttacctatattatatagcttatatagctttatttacttatatacaaccacctcttaatgataaaacaagatgtaaatcactaccttcaattacaccacattcagcaagtgttttatcatcatctaattgtctacctgcaaataggaatctttgttgttgtggtggtataccttctttaacttcaacaatttcctttaattcactaacttgttgtgttaattcaatattaactgggattgtacgtccagttaaactacgtatatttatttgaaccattgtaatactactgtactctattatactatactccttgcctctaataagaagaagaaagaaggtattatatagtgggattatagaacgcgatctttaataatttgattacatgaatatttccattagagaattacccgtttaggaaactttgtttctttttcttttccaactcttagacaatgttatcaacacctatagtgaaagatttagatatagataaagtatatgaacctgcagaggatactttcctatttctcgatatgtttgaacaacttcacgaggaacagtatttcactaatttaaattcagattctactgcaaattttgtacttgaaataggttcaggttcaggtttaattacaactttcattgctcaacataatattatcccccgctcttataatttagtatcagatataaacattgtcgctttgcgaactactcttaatacattcaatgacaataccgaaaatactaattgtgatgcattaagatgtaatttagctgattcaatacgatcaaatcaaattaattatttattatttaatccaccctatgttccatctgaggaaataccttcaatacctgatgccgatgatatttcaaatactgcttgggtagatttagcccttgttggtggtaatgatggaatgttaattacaaataatttattaaattcattaaataatatacttgctataaatggtgaagcttatatacttttctgtgcaaggaataaacatcctcaagttgttgaaaattttaaatcaaaatggaataatttccaagttaattgtgttattcaacgtaaatgtggttgggaagaattagcaatttatagatttaaaaaaatgtcttgaaaaataaagtaaagtacacattatatattattaaataaatcaaagaaaatatcatctgtaatacattcataatcaacttcctttaatctatattcattctcatatttcttaatctttaatgttttaaagaatatcattaattcactaatatcatcaattttattaatatttttcaataatggtactttcttaccatattcattaatatcatcaattattgaatatccctttaaatctaattttaatttacttattttttcaacaattccaacttcattaccttcaggtataatttcatgaattccatctaaattatcactaataaatatccattcatttaattgaaattcttcttcatttaaaataattaaaatatctaataatttacatccctgtaagaaaattatattgaaaatattatcattattatttccatcatcaattccttcattattctcaattttttcaaatgtttctgtaaataaataataaattgatttattaatcattatccatgtatcagttaaatgattctcactaaattttaaattaacaactcttaataaaacaaatatccaaccttcaagtaaacaatatttagtcatttgtctaaatgcaaagaaaaattcattaattttatcaattaataaactaataatactaacaaatttatccttttcattaattaataataaataaataattctcttaatatgtggaatattactatttaaaatatcaacttcatcattccaattaaataataatgtacttgatgtattagtactattagataaaattaatttatttgttataatatcatttaatttattatcatcatttaaaatccatcttttcataatatcattccattgctttaattgataactatttaatttcattttgaaaaattcattatcttgaataatttcattacaaaaatttttccaaacttttaattcattacaatttaaattctcacttaatttaattaaaagttccataatatattgtggaattgtatcaaaattaattaaattacccttattaataactccactaattccattaataatactactaaagcaattgttcaatttatcaatatcattgattaattcatgcatatgtggtataacttcaattaatgcatcacaaacttcctctctgaaaataattttattcttaggtatttcattaacaatttcctttgaaccatcctcgaacggtgatgaattctttaaaataacattagaaagagtattttgattagatccaactttggtagtaatacataaattcaacatcttaataaaattttcacttatctccctaacaactctcttttgtctaccatatgatgtttgttgtaatttatgacttgttaaacataaaaattttaataaatttggataaatatatttataatatgaaatatttgtaaatgaatctttaataaaattttgtacatcatttggccaaattttctctaaattttcagattcattcaaatttgcacaatattcaactaaaaatttacttaaaatattttcatctaatcttgaaattaataatgatcttttagtttcatctaatgatgaataattaactcttgaaattatactatccaaaatataacccaatataatattttgtttactatcatctaaaactttaaataatttaaatccataactattttcattagaattataacattcaattaatgcttcaattgtttctaatggttcaatatcataattttgttcaattaatttctttgatctaaatttgattttattgaaattgtacattgaagttttattagattcaatacttaaatgatgatttccatttccttgtttaaaatcacaattaatccaaatatcataaactgtaaaaatacttcttctaaatgcttcaattaatttccttttacgtttagtaccttcatttttatcatctgtattttctacttggaaaactccttgaataacagatccgaaaaatccagtttctttactattattattattattatttgaattcccaatattatttgttccattaccaattttattattactttgatttaaatttgaaatattaccaaatccaaatttatctgataaaacaaatcctaaatgtttatgacattttaataaaaaaatttcaattcctgaaattaattcacatattgaatcactaactaaattaattttttctgaatttccttgaattcttgataaataatctttctctaatttactactcatacaatcaactaattccatgcatatattacaaattaaatcaggataatattctgcagcacagaggataagttcaatccaattatcaaatgatgatgatgattgacaatttttaattccaattgtaataaaatctaataaattaattgattctttatcgccattattttcaaatactgaatatttactatgttgatttttacttgataatttaatcattttaggtaattgtttcaagataatatgaatttatcaaatgtttactaatatcattgattatttaaacaattttcttcacaattattaattaatgatgcgaaaattgaattgaaatttgaattcacttccatcaattaataaattaattaatttaagtgataatctcatacattttaagaaatttccaaaaatttccttagaattaattaattcatttgttggttcaatttccattaattttcgttaaaacattaaccataaatgatttataagttgaaatatcccaatttctatttttaataaattcaatttgtttattattatcaataacacataattctaatttaaaattatttaaaatttcatcatttaattttaataattcatataaaatttcaagttcattagatattttaccaaaatctattaaattcatattatcaattttataattttcttgaatataatcattattgaaaatatttgcacaaataattctgaaaattctatttgatgtaccattagaaattaatgatttaatccatttattaattaataataaatgagtatcattaataatttcatttaatataatatataatggtttatgtaaaattgatattgattcatttgtatcattatttaaatgaatccataatatattaaattgataaattctttgttcaaaatcatcaatttctaataataaattacataatgcagcttcaatatatgatgaaccaattatagtctctaatttccaaattctttcaacaatttcaacttgatataaattatttgatgtttgtaaacaaatccaaagtaatttaattgtaatttttaataattttaaactctctaatttattaatatctttgattaaatatttgaagagatatgaaataccgaaagatttatgaatatttgattccacgacattatcgtcaactttaatgttttttattttttctcttaacgttgatacattccatgaaattgaattagatgatattggaattattttaactaaattatcataaattttacaactttgaaaaaatatttcatcatttaaattaaaattatcattaattattgaataagtaaatcctaaatacattgcagataattcatttgcatggaaaaggtttagagttttcattatttgatgaatcaatattagtatcgattgaataatattccgatattttatcagatattgattttcttaattctttattataataatcaacatttaataaatttgaatctgccaattctaaaggtaataaagctctctgtggtataaatgaaattaaagttgttaataattgaatccatttaggattattttgaaataatgcaaatactgataataaaataattggtatatgagttatcaacatttcctcatcttcaacattataatattgtaaaatgaataaaactaaatctaaattcattatctttaattaattttaaaatatttgaccaaataatatttgtatctattgcatcaaataattgatttgaacgtttaattacttgatcaaattgaagattatgactttatattgaaataatgagatactttcataattggtataaataattgaggaacaatactttgaccaatttcccatttatccattattgaagtaactatagtacaagtattgatataatttgataataattcatcatcatcattagttttgtcttcctctatagagatcaaatttaataatgaatcaactgtatatttataactataagttttaaaatattgtaatctagaaatatgattattttgatcatcattaccatcaattgaatcaggtcctaataaccaattccaaagtcttctatttaatgacatatcttttcttaaaactgtattaataacatttataaataataaatttttatcattatttgaaaataattgataaacttgatgaatttaatggcattttagataataaaatatcgaaaaatcctctttgaacgaataaatttgaatcattcattgcactacataatgctctaattaataaacctggatctggtttaatacaagaaattgcatcattagataattgacttagtatagaatcttttaatatctcttcactatcgttactctctatattgacaataaatgaaggtattttcttagttaaatattccattgcaccaattcttttatcaggagatgtaataataatcaacaatatacattgccaaaaatgattattatcattcaattgaattttcaaattatctattagttctataattggttggaaaaattctgatgttgtatcatccaatgctgcaaataaacttaataaaattgatttaaagcaagatcttaaaaaaattggatttatttgacaaatataatttttatataaatcaattaaatcttgcttaatactaatacttgcatatgacattaatggtaaaatccctggtaaccaaattgtaattgatttacctaaattatcaaattgtaaaatattgaaaattgtacaatataattcaattgctttcttatgaacaccacttggtaatgaaggtaaaatacattttgataaagtaattgaaacttggaaatcataaggaatccaattgattgtattaatatcaggatttgttaataaagatttctgtaatttaactaaaaatgcaatataatctgcccattcattaactgaatcaaaattagttaaagctttttcaacatttgacatgtatttcttctccttgggagataatgaagtactttgacctagtgcagatgtctttgaattgaaggatttggatccctgaaatagagatattggacccatcattctatgcatgttgtctgtctaaaagaagaagagccttcacattaaaggtaaaaagtgcgattataatatgtttactttgtatacaccttttatataacacctttcttcctttgggtatgaagacataccgtgtactgtggtatccttttgaggtaattaattgaccccccgtagtagttgtattaagacatactaacatataattatattaaataacatagggtgttttattctttatatcaaggaaacaatgttggagatatttctttattcatatgagaccattgatagtagtatctttactggtttatctgataattatacccataactataactatattcttacttagtggtggtacaatattcaccgtaataccatcaattatacagagttgtaattttatcattaatttcattaataagaatataattttaccacgtatattaaagaagttatttgattttgtcattcatgaacatatgacaattaagtataataaattacccaagggtgtacttaacccttatttaccaggttattatggtgaaactcttttcggtagatgtttccgtacatttacaagaattattggtccattgatttggattagtagattaattatttgctttttaattaatatgataccaataattggaccaatattagttatattaattaaatcaccaaaatccgggtttagtaaacataaaagatatttccatctaaagggttatacaaatgcacaaatttattatatttggaatcatgaaaagttacaatattgtcaatttggatttatttcattattattagagaatatacccatattaggttatttatttatatttaccaatacagttggtgcagcatattgggcaacagatattgaaattgaatttaataaagatatgattaataaaatgaaagtaaagtaaagtaagtcatccttgattaaatatgtttacttaagaattcaacaatatctgaaatttcttcattacatgttgaatgacccataccatgatattcctttaatttataattattaaatcccaatcccttaaaataagtagcagcatctctagcaatattaatattaatcattggatctaaatctccatgaccatggaaaatatcagtatctttattaatatcaacaattctttctttaatacctttcttcatattgaaaaatcctgataaacataaaataccacctaatttcttctcatatgtagaggcaatacctaaacttaatgatgcaccttgagagaaacctccaacaattatcttattagagtcaataccattattaacttcatcatcaattaaattcttaattttattaattgaattccaataaccatcttcatcttgacgtgcattggggttacccatttcaaaaatatcgaaccattgactaactaatccaccattagcaattgttaatggtttaattggtgcattggggaaaataaaattagttgattggaaagtttcatgttgatgtaacatatcacttaaaaatttccaaccttcacttgaatcacctaatccatgcattataataattgatgaagttgcagtctttggtgcattgactctaagtgcattaagtgccattgtatctgtgtctgtttctgttggtctttccttggatttgaaaacccagataagaaaagctaaacatattaagactacatgaatgtatcgtaacagcgaagacattagtattaatactagttacttgataatagattataatagattaagaatagattaagaatagattagtaatgtccttgaagtgtacttatactacaagacagaatcagaatcacttgataataataattagtcatgattattaaccattattattaatatatatgtcagcaacacgagaacaatttttagttatattaatattaatactaatacaggcctttctttgacaaatgcaaccaatactgccaccaaaaccatctattccatcacaatcaaccatattaacacccacagatgacacgataatcgatgaaacactccttaatatatttaaatcaaaacataatggtacaatacctcaaataccattacctgatttccttcaatgggtatccaattctaaaataaaggaatttttaaaagataaagaattacagaaaggttatttagaaatcctatatgaagaagaatttaaaacaatcaatgcaaaacgacttgaacttgttgaattggaaagaaaaagattagatgggttattaaatgatataaatggaaacattaataatgttaatgaattaattgataaatttaatgaatataataaacgtgtaggtgaattaaatgattatcaattagatgtatttactaaattaaatgaattatctaaaccttcattgataaataaattcaatgaacaattactgttgattgaagatcaatgtacagaattacttaatgataagataaatagtaatgggaaacttagtgatgatgaattggtggaatttattgaaacttatacaaaattacgtgaaaaatggcatataataaaggaaattattgttcaattaaataatggattagttgatggtatagtatagtataatatagtattagaataaataaaaggtaaataaaaagtaaatacgataaataaactacttatgacttttcaagtaaataattacttgcatcttcaatactccaattctttaaacgtaatgcaagtattgattcctcctctgtgaatcccatatctgttaattcttcaattgccaattcctgtgaattacttaattcattattatcattatgtacttccggtactgatttgttgattctcttcttcctcttctttagcaggttgaagatttggatcattaccaaatcctgcaaatacttgttcccaatcatcaccttcagttgttggtgtatcattacttggattattttcaataaatgaaaatccatgattgttactaatattattattattattatcactaattggttcattatcttgttcaattgttgcatcctctaattcagaatctaaatctaaatcatcaaacattgatggtccagtttctttatgttgtggaatttcattgatattttcttcatgagatttactaccaaatggatttttagatgttgatggaattggtgatggagttggtgaatcggatgtaggtggtactgcatccttaaattcttcctcattcttcctcctcttcacttgatgaatcatttaatggttcaagttctttaattggtgggaattcatcagtttgttcaattgttgatttatttggtgtatctgataatgtttcaacttcagaaattggttgtgatgattgacgttgttgttcaaagttaagattggtacttgtacttggatgattaacaaattcaaatgattcattattattctctgtatttaatggtgtaggttctacttctttttcctcttcatttccttccttctcttctgaagcttcagctaaatcttcatcatcaaaatcatctaatgaagcagttggaatttctccatcaacaatatgttcctcctcctcatcttccacttcatcacctaatataccttttgatgcagcatttgataataaatgactataattaacagttttatctgcatgattaattgataaatctgtttgtaattcatgtaaattcatttgttcatcatttaattgattcaatttatttaataaattttcatgtttattatcaatttggaaaatattattattaatttcttcaatttttaattttaattcattattggtattttcttgtgttaaaacttgttgttcaataattgctaaataattctttgatttaattaatttatcatttaattcattaatttcattatcaatttctaatttttcattattaaaattatttaatttttccttaaaattagtattttttaattgaatttcatttaattctttattaagtgaatctttctttgtttgttctgcccttaaatttgtttcaattatatttaaatttttcaaaagttcatcattttgttcattttctttaataattaaattttcaatttcaattacttgttttgattcattttcatataattttttcatttgattaagtttatttaatatatcatctcttgctttaaaaattttatttaaatcattttgtgatttatcctttttattacttaaaattgatgtttgttttgataatgaattcatttgatttgaataatttgcaatatcaatacttgcctgtgcagtatcattattatttgatctaattgcaccaccaatggtactaccaatggtactaccaattgcacctgcagctaatccacttgctgcaccaattgctcctgcacttaatgaactaacaccacttgttacaccacttgttacaccactaacaggttgattagtaaacatacttgattcaattggattaacatttttaattacatcataattattattaccagtaaaatttggtttaacatctctacctggaataattggtacattattattagtattattaacattacctctaattttaggtaaatctaaattttctggaccttcatcatcatcggatgatgaattatcttcttcagtggtttgtaattctctaccaaaattagaatttggtgtaaatccaggtgttgtaactggtggtaatggagatggggcaacttgatcagctgatttgaaaatacctaataaatcatccatatgagaaggagttctttgaggagctgcttgatctttaacagtattaaaagatttttgttgagttgatggaattgtaggtttagtaacattattattattataattattattatcatcatcaaatgaactacttttaattaattcaattggagtttctaatggtaattcataaccagctaattttttttgaacaagatacattgcaattgaaaattcttgaattgtgaaaaaatcattatcattaatatttgataattcccaaatatttgctaaaattgaatttgataaatttgaagtaattaaaaaatttgcaacagttttacttgaaattaaattttcattattaatatctaaagttttaaaaattgaaccatattgttgcttttgttgatttgacatgatccaagtattaagattagtagttgaagttgtatctaaatttgaattttttgatggtgatggtaatggtgatgaaggtaaaggatttaatgattcaacattttgagcaactttccataattcaggtgataatttatttggtaaattattaattgaattattaataaaacattgaattaaatgcattgcaattataaattgtgatttatttaaattaccaatttgattttgatcaactaaattccaaattttttccaatatattaattggtaattttgccttaaggaaaatattttttgcatcattaccatttaaaataccattaattgcagttttatcaaacatttgaccaaatttagttgcttgagtaggggttaaaactggaataatttcaattgaagtagtagtagtagtaggaggaggaggaggaggtactatattattaaattttgccaaaggttgtaattttttaaaattttcaattgaaatatctaaaccaccattttgtacataagatattaatctcatcaagagacaaaattgaaattgattaagataacctaaatttgaataatcaactatattccaaatttcacctaatttaatcaatgataaatttgatgattctaataaaggtttaatatttaaacctgaaattaaaccatttttctctaaatcaaaggatttaaaaattgaaccataaaatttcttttcttcaattgttaatggatcaataagtgtatctgattctgacattgtgtttgtagaaataagtatttaaaaaggaagattaaagtggcaaagcaatgataattataattaaatgagcgaatcaactgcttacatgaatttttccatcattgattattattgattattattattattatcaagtgttttcttttaggaatggcagggatactgtaatgtttttgtcatgggaacttgtctgtttataagattctttcttaaagttaattagttgagatgaaaagagtttgatggaataatgatttgcaatttgaaaactttgtaagatactactaatagttttttatcagattccatataaagccagggtaaagtttacaaagttggttgatgcaatttcatatgtgagtgttggtcttacactggtatttttcaggtatttgaattttttgatgtcttaaaagagaatgctaaattaatgaaatctattcaagtttaagaatattcttgacttataaatatcaacgggggtagctctgggattcctcctcctaagctagaaagtattaacaattatatttgttatctactgatcccgcaaatcctagatttactgcctcattagtcgaggtttggaaggattagaggtttataaaacttattaaattatcacaacaaaatgatttaatattatcccctatgaagggttaatgttgctagaatttcatttatttatttaacaattttatttcaaattgtaaattttaatgattacttgaggattttgttggtttacaatttttctatttcaaagaaaccatttacatttacataggtgtttcagatgaagatgcaagtggttttgatatttcaagttggtaaattaatgataaactttttgatttaacatcagtttcttttattaaattgaattctttttgataatatttatgatccgtttgttatttacactgatcgtcaaggttaaattagtattttccaaaaaaaatttaatgttaaaagcaagaatattgaaatttctaaaagttgagtaacatgattatgctggagtaaatgattttgaaaagaacctaataggaacaaaatgctttgttatcattagtatcaaatttaagtattacaaccgaaaggataaaagatgaattacgaattaatgaaaaaaaattattattagtttgaaagcatgtgatgaacttaacggtataaattaaaagaattgatagataaattaccaattttatcaattttaagtatttaaagaacatatacaatgagaacttatattttgaaatgaataatcatttaggtgaaaataaaatgaaatttgaaatttaaattgatgaaaaaccttttaagataaaaatattaaatattgaagtattaataaattataagaaaactatcatcaattgagtttttaaatgaataatatatattggaataatggtaattaaatttctaatagataaaatatgatataatgatacttatttaatttatttaaaagctattaatttaattataaaactcaattttaattcaaatatgaacgaaattaaggtacagaaaaattcaaattagaaacaattgtatcaaaaaattgaacatgatatttaattgctaaatggccatattaaatttcaagtagtttatcaaatctactaattattgaaaattgaaaatgaaataattcaatcatgttaatctaaatgatttactttttatcattaaattacaaaatggcataactatcaataaaaggtttttcacataatgatttttcaactaaaataaaacatgaacataaaattctagttaaatttaataaacaaattattttctaagttataaaagaattagttgactatatggtttaatgataaagtcttatattattcaacatctaataaaattgaagaatttttcaacccacaattttccacatttttatccaaacactcagataaatcaattttttgtaatctaagtgtaaattctttatcatttataatatcaccaaatgcatacttcacatgttggaaaatttctttaattgtagtagtatcacttactggtaaaataattcttttaccattacctgaacgtatttgaatacgtgttgttgggtggttgattataagttcttttggttgtatcttgttatttatttctggttactatttcttctatttcttcaatatcagaattcttgatgattctccactgaatttaatgactcaacttcgttttcgtcattgatttcatcattcaaattcctccaactctcttataaatttattaacatcaccatcaccattattaattttaatattccattcaattaatttttccccagttaatggatcaattattgccaatatgagggaattcacttacattatataaattacaataattttcaccacttggagaatcatgttgatattgtaagaaaatgaatttttcattaataattctctttaattgagagtttttccaaaaatctctattaaggcattgacaattaaaatctgtgatgtcttgtatatttacgagaattaatttattttccttattagcctttaatttagcattgggtaaatcgatttgattaattaaatcccaaggaggtctgaaaatatttgcaagacgtttttgatgttgaagattcaggttcactatctgaatctaattcgattatattttgattaaaaattgatgattgtgtattaccaaacataccaccgtgtcttacaggtggaatataagagaaatcatttgataatagagtatcatgaattggttcaattggttgtctaattgagatatcatcatagagctgattttgtaaattatttgccatttgagtatcattttcagtaccgttttcaaaataaagtgaaattgctaaatcaatatcattatttgacatttctaagaatgatttagctgtattaatatcattacaggatgttatatccataaaattactatataattgatccattataaaaagaagggagtgtatataatagacattacgcactattaatttcctttattgtttcattaattgcattatttaagttatttatttcatataatgatattaagtcttctgatgatgatatgataatgtattatcaatatcatttaaacgtttattaatgtaagatataagttcatgtttattttcattaataatagtttgataacgattagtaatttcttctatagacaattctttttggaaattattatcatttaatttatacttgtaatttattaaattcattaattaattcattttctaaatgattaaatgatttatcaaatacatttgagaaaactctaggtttaaaaccaagactctttttagaatgtttttttgagtaaaagatttgtgtttttcagataatgattgtaattcattatcaatcttagttatttgattatcaattgaattacatttacttataattgaagattttgttaatttttgatatttatccttaattaaggtatctaccgaaccattaaatgtagtatcctctatatgaccatcagacactatatcatttttaatacttattggaataaaaaattttttattaatatcaatatcaacaatattattaatatgattgtccattatagtatagtcgcttctttcagtaaacaagagatggattttatattattaatcaataaacagggtaaagttagattagtcaaatggtatagagaagggaatggatggtgataagataatcaaagaattaagtacattaatccccatgagaaagaagaatatgagtaatatttacgaaactgggtggtatgaaagtaatttacaaaagatttgcatcattgtatttcattgtaggcataggtaaagacagtaatgaactcatagtcagtgacatgatacagagatacgtggaggtgatggacagagagtacggcaatgtctgtgaactggacattgtgtttaactaccaattggcgtacaatatactcaacgagctgttcatcgagggcaaattctacgagccttcttataatattggtggtgcactgtagaacgcttttcattggctggagggggttttatagtatttcactttttttatttgtattggtcgagtattatagtatagtatagtatagtatagtatagtatagtatacacatcttcttaaacaagcaatgttatcaagatcaatcacctctattccaaaatactctactgctgctattagatgtatctctaccactccaaaggataaggcaaattcaattattgattcattacctggtaattcaattatctccaaaactggtatccttgcaacttcagctgctgcattctatttactgctaatctcttctgaattatacgttgttaatgatgaaactatccttttagcaacttttatcggttttatgggtcttattggtaaagttgttgctccaatgtatggtgaatttgcaagggatagaactgctcatgttagtaaaattcttaatgatgcaagattaaatcatattaatgctattaaggatagaattaatcaagtttctaacctcaaggatattgtttcaactactaaaactttatttgaaatttctaaagagacagctgctttagaggctgaatcatttgaattaaagcaaaaggttaatgttgcaaatgaagcaaaatcagtccttgactcatggattagatatgaagctcaagttagacaattagaacaacaacaattatcttcaaatgttattgctaaaattcaaaatgatttgaaagatcctaaattacaagataaaattcttgctcaagcaattactgatgttgaaaagttattctctaaatagtgtctataactgttataactatttatttatttatttatcaatcatattactatatactccattatattcaattttataatatcttggtttatcctctaagggcatactaacttccccttctccaacattactcttaaatggtaccttatattcccttactttccatttaatattcccacctctaatactctctcccttaggattcatttcttcatcaaaatatccactatccttaaaataacttacttctttcttattcttctcatattctatcattatttgtaaatcaccttgtaatttctcaatttcccctaattcattaacatccttctatccttttccttaaattactagaatccccccatctatataataatctttcaattttatcccttaaccaatcctctctactcatgaatataccaatagaccttacttgaacaattaagaccaagacttgctaatttaaataatactttgaaaaaaacttgaaatttcaattattaatctcaatcattcaaacacaaatgacttaatttcaatacaaaatcaatttaatattgcattacatcaattatcaattatattctaattttataaatgaatcaaattcttcaattctttcaataactaatgtattcccaaataatcaatttaatccaaattcattaccttacttacttaacttactacgtaaaaaacttaactcctgaagtagaagattggataagtatagaaaatgattcatcacctcccataacgtcaaatactaatgatgcaacaactaattcaatttcattagaaaatgatcaattcttatcaaaactagaatcattaaatgatttaattataaatcatgctacagattcattagataattatatttttaatggttatttaacaattgatgaaattaataataaaactccaattaatgaagttctaaacattaaacaatctgatctagaattcatcaccctataccttcaaatgaatcttcattacttaaatttatctatcaaggtttataactatatacaagaatttcttatcttcaaaacttagactaataacatagtaaatacttcccatgatccaaacataatcatactattaggtacagttctcattaaatgtggtgttaaacctccatacatactaataaatccttcctctttaataactaatttaaaacattgtattaaccctttatatttaggttaatcaccttccattggtgcttgtcttaaccttgttctaacaacttcatgtggatatgttattaatgatgcaattaatttagcaaatcctgcactacttgatctataaatccaatcaattgtttcatttaatttagtcttttcatttaataaatcactacgttttttaattaatatcttcatttgttcatataaaatccattgaattgtactttcaatactacctaaataacttgcacttaatcctctatacattgcaaaaaatccttcatttttaataatttttttaatacaatctaaagaatttttatattcatttttagttgctttatctaattgtaatcttgttttaattaaccatataggatttgtaacagtacttgtaacaatacctgcattaatacctgaaattaaatgtaataatgatgattcttcattacctttaaaataatcaaattttttaaaaatttctttactatatccataagtgaaaaaattaatacttcttgcaggtataacaccaattaaacttggtcctaaacctttaaataatgatcttgtaccttccattttataaacattatttaaaattaaacatgtttctttaaaatgattaaatatactcttattggaatttgatttatacatattttgataaactgatgattgtaatcttgttttaacaacatcaaatggacatgtgaaaattgctccacacataccacctaatccacctgcaacaaaatgtacccatggtttaactgttggtattggtgtaggaagattatttatttctttcatattactatttttttcatcacttgctaaaaatgaaactgattcatcaatatcattctcaattttaattaatttatctaaattatttgatggatttgatgaatctttcattgggggaggggagggggagggtatatttgcttatatagaaaaggctttaaatgaattattttatgataatgaatttttattgagataataataaaattttcatgttgaaacattataacggagtagtttaatatacgatcaaaattaccctttgattaaaaacttattaatgtttaaaacttatagtataaaagatgtaatatataaatatatagataataaaatataatacttaaatgtaagtttcataagcaacaggagctaaagtagttggaacaccagaaacaactcttgaagatcttggaccaacaggttgtctctttaattgaactttttcaccagtttcctttgcagctgctctctttgcagaattttctttaactctatttaaaaattcttctctacattttgaatgtttaacatgttcaattttaatatttaatcttttttcaatatatctatgaccaacaactttattaacaataacaccaactgctgattttgtaacattgaaaacaataccagttttaccatgataaaatttaaatggcataccatcatgaattgcaccattaactttaatatcaacaatatcaccaactttataagtttttaaatatgtagtcattgctggtgaaccatgtttcttaaagtcacgactgaatgcgtaacgagttctagatcttaaaccatgactatattaataattatattatgttttgtaaattaattacattaaaatgttagtattaatgtctctttttaaaaagatatatatatctcttttgtaacgtcatttagacatattctccttggatattaaattaattatttgtacataccttttacccattttgtattattacccttggttatttgaatcaaatagaaatcaacaaaataactgaataattacaattaaaatatttcagtaaatgtaataatatcaatattaaagattataatatttttttttcacctaattgtgaggataataatagtagggcataatatttatctctgtgaccgcgaattcctcttttgggaagtgctgtgcgttcttttcctgcagcgaagggttggatgccctctgtgtgtgcacgtgatggtgattacgtaaatttggacatgaatatttataatagtcttatagtagtagagtataggttattattacaattattgatgatcgtattattagtatggttaacagtttattattaatttatattacagaaaaaagcagataaaaaatggtatattgaaaaaaatatgtgaataatgtttaattataaaatattaaatatatcttactatattattgaataatttattcatcatcttctgcaccttcttcagatttagaaccttgagatcttctcttaactctacctgctctaccaccaccatatggtgaagttggagcaaattcaatatgtttttgagaatctaatctaaccataaatgaaggaattgaaacaatttgtttaccaactgcaatatgtctttgagtaattaaaactcttgcatgatgaacagattttgctaaacctaatttgaaaacttgagtttgtaatcttctttctaagaaatcttcaatttttaatgataaaacataatctaatttcattttatcttctgataaaataccaactctaactaatcttctaattaatgcattaccttcaaataatctctttggatccttttcatctctagttaataaatctcttgctgctcttcttaattttgataattggaaaccaattctataaatttctctcttattctttaaaccatattcaccagctaattttaattcaccatctaatctagcagtttcgaatggtctctttggaacggaataagtctttgagtaatttcttggagctcctatagtaataatattaatgttaggataaggttcttaaaaacatattacacgaggtcattacagggggtacgagtatatttacaataatttataatctcagataaacctataaaggaaaaaaaataaaacatagatgcttgcaaataattgcattaatccataagttaaagtgtcgggagtttaacttatgaattacatctaatatttacattaattatttccaaattctctaaagaaaaataaattattaaaataaataattatcgtacccgattaagagataatatcaaaccagtataatagctggatgattaaattatccttgtaatgaccaataaacattgtttaaactattcaaattaataaataggaatggatatggtttgtgtaaataaaaaaaaagttagtgtaatgtatacgtacttggcattttgattgacttagagtttggatgattaaaagaaaaatagtaagttagagataataacatgtaggaaacgacttttaatttataaagcggtagcgaagaagttgaaaaatttgaaattttttgaaattttttattttttttgtgcgtgaaaattttcatattgggtttcctatttgggtaattagggttaggagggtttattttaaattgaaacatattattatctcatcttatcttatcttatcttatcgtattagattagaatataattttagagtatatgttatatatatgggtagtagaaaagaataaataaaaagattggaatgtaaaatgtgaaaataagtttatttaatcaactctttgccttttattacttgataattcatcatcaagtacaatttcattttcctttgaatggaaatctttaataattgaatcaacatcttcaatacctaaaggtctaatatcacccatttttttaatttgttgtgtaacaattttaatttgatcatcagttaaatttaaatttaattgttcaactcttgccttaattgcattccaacctgttaatctatttgcaaaatgaatatatcttgttaatccaaaatctgttggatttaaaatttcataagttgaaggatttgctaaaattgcctttgcatgaatacctgctttatgagtaaatgcacaaaatcccggtaattggattattaaaaggtatattaacttgaacaatttctgcaattaaattctctaattctctaattttatttaatttatattttgatttaacatattctggtgcacttacaaccattctagccataaatccacctaatggtacaataccatttctttcaccaatacctaaaatacatgtatcaataaattttgcaccagcctctaatgcagtataagcatttgcaattgcacatcctgtatcattatgaaaatgtgtttcaatttcacatttaacacttgatttaattgttctaattaattcataaacttgtcttggatttgcacctccaacagtatctgcaataccaattctattaacaccaattttatcaactgttgtataaatatttaataaatcaacaatatcacttctaaatgaatcttcagttgaaaatctaatttctaatcctttacttttaacaaattcaataacttcaattgcacttttagtaataaatgacatatctttaccatgagaatgttgtctaaggaaatttgatgtaccaatgaaaacattaacaccatcaactcctgtttcaactgcaattttcgcatcatgcatatgacatctaatatgagttaaaatttttgaattttttaaacctaatttacaaattgtttcaacttcctctcttgcttgatcacttgcaactggtgatgttaattcaatataatcaacaccaaaatcatctaatgctttagcaattctaattttattctctaatgtgaaaaatgcattagcaaattgttcaccttctcttaatgttgaatcaattatttcaaatctcggcacatttgatataaaatcacttggatttggtgcatatggattatgtgtagttgacattgtattttagttagttagttagttagttactttaaaaagaaatagaaccaaggggaaaaggaagaaaaagggggtttaaataaatgaaaagttttgttaattaaaatatcaaattggtcattagttgatttactcaaaagatatactgactcatataaaatggaaaataatacaatagaaaattgaaaaattgaaaaattttaaaatggaaaaaccggtgcgcgcaatttttcgttttgggaattacccgtttaggtaacttcggtttactttagagagagtaatatggatcaattgatgtaaagagatggtaattaataagtggaatgagtgaataagtgaataagtggataaatattctatatttaatatcattgtacaactttttttccaagataatgtattaatttaaaagtttcggggacaaaatcagatatctccgaaatgtattccagtaggttatttttatcggaaataacaatatcgtacttcattgatagtatatctgagtgttgtgttatccataatactatatttgttgtatttagcaaaaaaagaggcaaacatcatatcttaaaaataattgatgttaaatttttttaacaattgtaatcatacttcattgttgagataccactgcattaacaaaaaaatatttttttatgttttccaagaataaaaaaacagtataatactttttttactatttttaatataccatcaaaatattgaatttaaaaacctgttgtataaatgtataaacgcaaatcattgtatcatatttcagtatcacgtgactagcaaacccaatgacgaggctcaactctgttgactataaaccttgtaattggcaatttgtccgagtggttaaggagaaagattagaaatcttttgggctttgcccgcgcaggttcgaatcctgcagttgtcgagttaacgcgtttatttttttacagtatttaaaacacttaatgctttgctatatgctttataaaccttttatttattttttaattctttttgaactgaatagcaatgtattattatcatcaattaattaatacaattgatttcttcttgactgaaaatcttgttatcaaacacttgtagttctttcctatcactatttccattactcttctttaaccttttattatttttacaattaatatcactctttatataaggtttccttttctttggtgattgtttaggtttaacatttaatggttctacataaacataactttcaccgcataacattaaaacatcctcttcttcttcatctgatattaatgatgatttaattttacattttattgaatttggatcattaacataatcactacaaattttagttattttagttaaatcatataatattttaataatttcaattctttccttaaaataattttttgaaaatttaatataattatttgatcttaaacgtttttgaaaaactgtaattttatcaattgggaatctattaattaaattaattaatcttttaatttgtttatttgttaattttttagaaccaatttgatttaataatttaatttgctttccaattctatttccaatttttgttgataaatataaatttctattccattcattggggaatttctttaaatcttcaataaatgttgaatcaatattaaattttttaaaatgtttccttaaatttactgctattatatcattaaatgcctcctcagcatcatttaaataattactatctaatcttccccatcttttaatgaaattagctacaaatttattaattactctctcgttagataaatcaatcatacttaaaagaagaaataacaagagcaagaaaaaataaagaaataaagaaataaaaaagacatgaatgagcctttaaaaattaatacataaactacttacttacttacttacttacttttcggtataaatggtgatacatttgtttcagtaaatggattcaatggatattcaggattgataatataccctcctttatccaattcagggaaattaactttaattttaccaattttctcttctttacttttactatcatattctctagtcatccaccatctagaatttttacttgatggtgcaggtaatccttgtttaattaatgaacttacttttgattcagctaatattgaattcattaatccaggtgtttttaaatatccatcattattacttgaataaactttttgtttagtaatttcatataattccctttcaattttagatttaataatttcattaacaatttcaagtcttgcattgaaaattccataaactggtttatgatcactaaatttatattttggtatactattatatcttaattgttctaatgatgtaaatcttttatccttagtatgagttataattctatctgtccatgatggaactctttgtttctctgatgaatcatattcatcagtacctttatcaaatttatatgttggtttaaaagttatttccatttcatcgaaaaatgggaaactcttaccattagtcatttgtaaatttaattgatcatattcaaataattgttcaataattttcctttcatcaagttcatttaattgtgtatttgatgatattaatttctcttgatttattgaataaaatgattgttgatcatcttcaccaccttcattatctgaatttttttcatcactattttcatcagttattttcagaataatacttgttcttgaaccatttcttgaatgatcatttcttaacatggggaaattagaatcttctgatgatcttggtaaaacaactaatttctttactgttattttaccataattatttgattttggtgaattattattaacttctggaactggtaattctttaatttcagaatccccttcatattcaaaatcactatctttataattataatcatcagaatcaggttcaatttcaatatcatttaataataaattaaaattcctacgtgttaataatttattctctaaatctttttcattttcattctcaatcttcatctcttcattaaataatttcttactcttctctcttaatgtttcatgattatcattaacttcatcatcattatttgttaaattctctaattcctcataaatactattattatcatcattataattatcaactgatacactaatcatactttccatactttcattacctaatgggaatttactattattattattattattatcactatcactattatgtaaatgtaaatgactattaatacgacttagtctatttttatgttgttgtaactgtgtcttttcttgggtatctatttgggtattggtattggtattggtacttggaattttatatcctaacaaagttctaacagcttcatttggtaatgcaattctaaaatttaaatctcccatccaaataattatatcagattctttaatatttttacattttttaaatgttaatccattgaaaattgttttaaaattttgatgtctctcttcactattactttgacctgcagctaaatgagctgcaataaagcaaattcttgaatttttattaaatgtaaatgtaattgcaactccacctttattagcactaatacctttaaatccagtttttttaacacttgtttcaatattttgtaaattatcaataatttcaacatttgaataaattaataataatataccacctaattgttcacctcttaataattgatatcttctcttttcattttttgcattaattgtatcattaaatttagattcccaaaattttctaatttttaaatcaattgataatactttacttggagttaattcaattacttcctctaatgcaattgcaattaaatcatatttattaaatttatcaatttcagggaatattaaatcatttaaatcaccattaaataaaattgcattaacattaaatgtaactgtataaattaataaatttttaaaacttgtaaatttatccctattttgtttattaacagtttgaattacataattatgaattggatcaattaatttaacttgaatttccttatttttcctacctaataatctatcaaattgattttgtctacctgaattactatttgaaattaattcattattatatgaaacatattttttactttgttcagcaaatttaccaatcaatccaccagttttattctttgttttaattgatgtattataattatctgataatttacctaatgcattaccattagaatcccataaaatattatgtttttcccaaatattagttgtaaaattattaccaaataaaatttctaataacatttcacttaatttacattcaatatgatttgatctatcatttgaatctaatgtattaattaaaaaaattcctaattgttttgatgtaatttccattttatttaaatcgaaaacaaatgatgaataatttttcaattcattgaaaatttcttcattttgcattaatattgaaatataatctgatttacctcttaatttactacttaaactattttcagggaataatttattatatttaatatttaaatttaattcatcattttcatttttcaattcactaaatgcttgaaaatatctattacttaattcaggttgactacctttattacttaatgaatctaatataaaaatttttttatattcattaattaaagtttcaaaaaatctattaaatgcatgtcttgaagcatcttcacttcttgggaattcaattttagttgttaataaatgattatctaatttccaaaataatggtacattaccttttaaaattgaataactaattaaattatcacctgtataaataattatttcagtttcaataaaatttgcaacattaccttcatcatccatacaagcaggaccaaataattgaccaattttccttgaatcttgtcttgaaattatagttatccaacaattttcttcattatttaaaatttgtaaattaacgaaacctctaattaatgttataaaaaatttacccttatcgaaaatcattctttcattatttgataatctatttctaaaatttgataattcataaattaaattaatattccaaacaaatctacctgaataatcatcttgaatatcattaattgttgtataagaataatttgaaggatttttcaatttacaatcttgtaatttatttgctaaatcagtttcatttgaataataaaaagtaccagtttgaagtaatttcataatcgataaaatacctgatgttatagttgatgtattatcctcaattgtatcattataagtaaatacttcaccattaaaattaataaataaagtatttaataatttgaaaacatttgtacctggtataattgaaccaacttttgatttaccacaaataaatcctgcatatatgataccctttaaagaaatcataccaataaatccaaatatttctctttgaattaatttaaatgatgataattgaattgtatttcttggtataaattcaattaaacaacttgaattattattatttattgtaggatctgattcattattattaattatactattatcctttgaggaattgtccatcaatatcaatacataatcattagaacatatagctattgttctagttatatcattaacgtacaattccatatcgattcccagtgcttaaaagaagagaaagtagtggcatgcacatgtggtggataatcattatcattaaaataattacataatctattttaagccattctgttttatttactattattattattattattatgaaaaaaactatacaaagactaaatagatataatattatgtctaattgcaaaattaattgaattaattaatgcaattaaaccagattcagttacatcttcattaataccaaccccccaaataattgtttcaatttcattaattttaattccaatataactaacagctttagaatttgaatctttacctaatgtatgttcattataatgtataacatcaatattaattttaaaataagtagataaagcattagcaaatgctgataatggtccattacctttaccttgtaattttaaatcaagggtattactttgaattgatgcaataatttgtttatttttatttgtttgatctgtaataattttataatcaattaatttaaataaatctaacattttaattaaatcattatcattctctaaattttcatcaaagataaaatatttttctttgaaaaggtttaaaatttcatttgttttcaattctcttttcttccattcagtttccatttgaacaaattttgaaaaattaatttgtaaacctcttggtaaatctaattctaaatttcttaaaataatccatgatgcaccacctttaccactttgagaattaactctaataattgcttcataatttctaccaatatctttaggatctaatggtaaataaggcatattccatgtaatatcaccagtttctttaactttatcttcatataatttaaaaccttttttaattgcatcttgatgagaacctgaaaatgcacaaacaactaatgaaccaccatatggagctcttggatgaacaggtattttattacatttttcaacaatttcaataactgaattaatatttgaaaaatttaaatttgggttaataccttgagtatataaatttaatgctaatgtaactaaatcaacattaccagttctttcaccattaccgaaaagacaaccttcaactctatcagcaccacctaattgagctaattcagcagctgcaattgcacaacctctatcattatgaggatgtaatgaaatacaaacagtttccctttgagaaatattcttagagaaaaattcaatttgatctgcataaatatttggagttgacatttcaacagttgcaggtaaattgaaaataattggattctccactgttggattccaagcatttttaacagcttcacaaatttcaattgcaaattcaggtgaagtatcagagaatgtctctggagagaattcaaattgccaattagttttattgtatgaaggatcaggattttcctttgttaatgatttaactaataaagtacattcagttgctaatttaattgattctttttgtgacatattaaaaattatatttctaaaacaatcagaagttgctaaataaatatgtaaaattgcatttttagcaccttttaaactttcaattgttcttttaattaattcaggtctacaaggtgataaaacttgaattgcaacatcatcaggtgaattttgaacacaccatttagtaaaatcaaaatcaatttgtgatgcacttgggaatgaaacttcaatttctttaaaaccaatttctaataatttattaaaatattccttcttttcagtaattgtcattggatcaggtaatgattgattaccatctcttaaatctgttgataaccatcttggaggtttaattaattgtttatttggccaatctctattttgtaaattgattttaggattgaatggtttatatttaattgaaggatcttctaacatcatctttccagttgggttattaagtactaaaccaaaagaaataagtaattaaaaagaagatattaaaagaagataacatgacttataacaatgaaaaactctcgccatgtttagtggggtatagtcataaggtatggtataagtgtatgagtcatatagttatcaatacagctattactattggtataaaagagtatgtggtatgtattatagtattggataagcttaaatgtgtagataactagtaaagtacaagtaagaagacatttactatgtgaaataaataaattttcacttatatagttatttattattataattattataattatttatataaacatctttttcattaaacaagacaagacaatacaaatggttaaagtaaaagttgaattcttaggtggattagatcaaactttcaacggtattaagaatcttaaacttgaaatagatggtgaagaaccaaaacttattgaattaattaataaattatcaaatgaatatatcagtaatgaaaaagattttgaaatgtttatacaagaaggtacaattagaccaggtattttagttttaattaatgatactgattgggaattagaagataaagaagattatatattagatgatggtgatttaatttctttcacaagtactttacatggtggataaattattgtataatttattaattataaatttataatcattttgtaaatgaattattctatttcttgttttggaaatttcaaatatatcaatatcttgtcttggatagtcgtccatggtctttaatggggtattcatatctgcattaagggaattaagatattgaaataatttgttaaggtcagattcaatttgagatttaaatgttgataattgttcaaatgatagatcagtattagaatctaatgatagattgaatgtatatgatgacatagtgtattagatactatactatactgtttataaagaaattatataataatatataggaagaaaaaaacatgtgtattacaaatacaaatataaaagtatatgaaaactattaatattaactaattaatttttcttcttctttttagaaattgatttatgagattcaggtaaccaagaatctaatgaaggagaaggagaattagttgtagatgatgttgtagaagtagtggatgatgatgatgaaactgattttttctttggatttgaaggtaataaagattcaggtaaaatatttgataaatatttacctgcaaatgtaatataaatataataaccaattgcaaaagttgaaacaattaagataatttcagaaataattaattttggattaaaaattgaaattgttggttcaataacattaattaatttattctttgaacctaataacataaattgttcttgataaacaacataaattgcaggaactaaaaggaaattaccaattggcatattaataccaactctttgagtgaaaggagttgtaacattattagtaacttcaattggaccaatttgtgaagcagtaatattagccataatttcaccagtaactggatcaatcatttgaccaccaacaccaacaattgaaacatcttgaggttctaaatttttaaaattatataataattcaatagtttcaccattaattaaatcatcaattaaacctgatgaaatatcttctttaaatgcaatattataatcaataataaaattaaaaggtttttcaggtgttggtacaaaatttggatcagtaactaattctctttcttcaataataggagaatcttcttcacttacttcatcattagctaatgagaagttaaggattgataaaagatataagaaattaacaaataaccacatttgttaaatgaaaggggatcaaagatgaaacacgtatgtaaaatggtgataatagtaattcttaatgtgttgtccattatcttcttccaaatcttccaaatctctttcaacaataggtgaaataactgtattacataatctcttgattacgtaataaagggctggtaattacccaattaggaaatattagaatcttctcttaactttaaaccagccattcattgagtatataaagacttggttatttcctgtaataaagtagtaaggtagcaatggatagtatatgttagtgtatattatattgtagtatattctctttcaattgaaataaaaaattaattttctatattttcttaaattcttaaatttcaagtattgataccacaaacaagacaagacaaaacaaaatcatctgtgatacctctttttaatcaattaacttaactaaccaattaatcaattaactcacccatagtcattcttttacagaactaatacattttacttattttattcataaatatttttattctattatcttttttccaactatagtctttcatttattctaatatgatctttaacattaacattaacattaacatttatttattattttcattattttcattatttacaattgtcaattcattaccaattgatattaataaaagagcaattgaaacaattactgcaaatccaataattgaaactaaattaacaacagttgtaccaaataattttaaaactgttacaactgaaattaatggtgtattaggtacttatttacaagaagttgtaacttctcatattaaatcaacctatgttagtgaaagtatttatacttcaactgaacaaccttcaacttattcaagtacagttattgaaacaagtagtacttcatcttcatcttcatcatcaattgaaacaacatctgcatcaacttcttcatcaacttcaagtactatcacatcatcatcatcatcaacttcaagtacctatcacatcatcatcatcaaactccaactactccaactaccacctctacatcatcaagtacctttacaacaacttcatcatccactactaaagctgagccttcaccaactacatcatcaccaacaactacaccaacaataacatctaccacctcttcctctgctacaccaacatacttcccatacaccacggcatcagcaggaggcacctgttacataatgtacgctgaggacaacgataccagtgtgtacacagatgaaacaccatatacaacaataactttaacaagcgttgttgccactgttacaatgacgaggtgagtttttattattattattattattattatgtattttatatagtgtttactttctttcttttaacctcttttattaatggacactgtagatataccggatctatctcctggtatagatcactctatagagactgctcaaagagtttatatgaataatgggaattcacttacttctataaatactttctcaagtgatgaaattgatttagttaatgatagtcataatgttactaatgataataatgataatgaactatttgaacattataatggatcaattaaagatttagctgataaagtagtagtagatagtagtccaatacctattattgaagaaaaaccaatacccattaaaccaacaccattaaaatatgataaaccttataaaaattatagaaaaccatcaacaattataaatgatgaaatgaagagaattgaaaataagataactcaattagaattacaatttaatgaattaaataccaagtattataaactggagaaagagatcaattatgttgatgaaatactttcaagtgaaaattaccagcaaatcaatccaatatcagaaacttttatttgcaaggggtaaattaatggataaattacaaactgtaaagaaggaaaggtacgatatcggtgtggtgataagtaagttacgcaggaaagtcaatggagatgatagtggtgatatgacccagtattttgcaaggaatgtaagtagttagttaacctatacttaattataagagaaaccctcattaaaggtaatttccaattgtttgctatttaaatagattttatctttatctttttcttttcaacttctttatcttcagtttctttcttttaatcaagtacattcttactctatattgtattgtaatatactatactatactattacttaatgatgatattaaatttatcttacctgacgcatataccctcgtctttcaacgagctggtttaatggaggttaagattttatgactacaacggtatctgataagtattgttcttttattttatttgtaaacactctttccttccttccttttattaacaacataataatgtcaaaatttggtaatcttaataaaagagaatattataatttaaaacatccttctccattacctattataataccattatcttacatatcaaataaatattataaaccaattgaaattttaaattcaattaatgatactttatgtcattttataattaatattagtggacatgcctatatagatgttatatttgatagtaaattagattcttcatttaaaataacagattataatgatatgatatttatttggaataatggattttatggtaagggtaatttaagcaggagtgaaccaacttttgaaaagagaatgttacaaaaaattaatgattatttaaataatgataaaaatactaaacaagatacaacatttagtgaagaaataactaaaaatagaagatatttaagagaaatttggaaaaatgaaagaatttcacttattaaattagagaaagatataaagattaattcaattaatggtgaaatttcaattttagataaagaaaagttagaaattgaaagagaaaaattatcaaaattaaaggatgatttaattaaaggtaatgttagaattgattcaaatactccaattaaatagtgattcaattaaaaatagaaatactttaagaattgaagattatgatattataattgattctaataatattaaaaatattgaatatttacaattagataactgtgaaacaatttatcttaaacaattaaatatgatacgaattaattttgataatataccagatatttcactgacaaatttacttaagaatttaattgaaatttatgatttcgaattattattgaattatgttgtttattatcattataaaactttaggttggtgtgttaaaaatggtttaaaatttagttgtgattatatattatatcaaagaggacctccattctctcatgcagaattctcaattaagatagtaacaaataatgaaacagattcattaattgattattcagcaatttcaagagttgtttcaggtgttaaaaaaaatttaatactttgctttgtaaatcatccaaattttaattcttcacaatggttaaatatttggaataattatttaattgatggtgatttaatttctttattaaataatttctcaattaatgaaattaattggaaaagatggacaccttcaagaactagaatgtagtaatttattcttttataccaaccctttatatgcatcaataacaaatttacaatctctatcacctttactaatacaaacatatgaattagtaccctttttattattatttcctggtaaaatacatttaatttgtgaatcaggaaatggacatggacattcacttgcccttttaacacatgttaatgtatcaggacaaataaatccattattacattcttgtctataaaatctatcttgatatgaaatttctccctgaccttgaccttgaccatgacgatgttgttgctgttgttgttgttgttgaaaaaattgatcaaaaaatgcttctgttggtattatacccatcattatcattactattatacttataatattcattgtgtatgtctattgtacttactttgaaaagaacacgtagtaaggtagtaaggtaacatgaatttaaaatttcaaaccaatctcgaatttgaccttactctctctcttagtttatttattctatctgaattattgctattcttcatgtctatctcatattcaactggataattgatagtttcatcaggtatgtagtgtcttttaacatattggtataatttctcatctttattaaaatcatcttcattaataaaaggttcatcatcatcaaattcattaataacttcattgatattactcagatagttattgttattattattactagtaatattatttgattcttcaagtaatggtgtagttatagtatcaccattattattattattcctgactatttcacttagtttacttaatcttggtattcccttcatactattattattattattattactatattattattattattaccacttttaacactttcattatcaatcccaccttcaggatcaacattaatccaatatttcttaccattaccactaattcttaatccttgataaattttttgattaaatgtatctgatttatcataaattttagaatctgtaattgcatcaaaatttcttaaattataattatctccataaattgtagttatctttaaatcataaattaaatcaccaatattaataaaatctttaattgcaaataaaatttccattttacttgaatcaggtattttattaattgtaaaatctttataagggaatgatttccaatgtaaaattgcaaagaaaatcatttcaaaacttaataaaccattttgaattatttcacctgctgattcattttcaaaaattcctaaccaattcattataccaattaaaattccttgccaatatgatgcaaatataattaatttaacacataaaaatttactccatggttggaaaatatttaattcatcatataaacatttccaaaaaatacctaatgaatataatgaaattgtaacacttaaattatataataaaccaatccataatgaaatacttgaaatttttaaattattaatttgataaattccaattattttactaatataaataattaaaaataataatggtttaacccaaacatattgtaaaatacatctcttaattgttaaaaaatcttttggatgtgatatattaattttacccaatattaaattaattgggaataaatgtgaaattggttccttatttaatgtcattaatataatcttcctctctccacctaacattaaaactaataatttataaaatgtataaataacgaatgcttcataaatttccctgattggttcaattatactaccaattgtattattaattaatttactataacatgaaatggcgaaaagtggtacaattactaaaattctaacaattaatctctgttcaaatggtttcctgtaatttttcaattgtaaatatattccaattaatgatataattattgaaataaatgtagttataccacatattattaatatccaatgtggtagtttaaatgttgattccattacttaaatgaaaaagaagtgttaaatagagataagataatatataattttttattagctgagcatttcatgttactttaactacatgttctttcttttataaataatgattttattatgtttattattacttataatacatattaatgcagctggaattgcagttcatcttaatattgcatcaagaattaaaaatcaattacccaattcaattaattcaaatttaaatgtttattattcaggtgctttccatcctgatgctttctataattgtattggagatttatcattagctgcagaaactgctcattggcctccatttttaaaagcttcaattaattattataatgataaatatatatctaaaggattgactaataatgaattaaaatcttttatttatggaattttcactcatcaattaactgatatttcatggcattcattaaattcaaaacaaggtttattagaattattaacaaatgttgaatttaatggtaataataaattagctcataattatttagatacaattggtgattttattacattacatagattatttgaaaatatttcaattgattatagaaataatttattagatattttacataatgattggcaatatccaattgatgatattgttaatatttacaatcttttaaattttaataaaattgataaatttaatttaaaattttgtatggatagaggtcattcagctttaagaggtgaaattttaactgttttaactgaaaaaaatttaaaaaatagattaaatattaatttaattgaatctccattaactgtatcaattttaaataattatttttatggtggaattgatgaaatatcacatactttgagtaattgtttaaatgagttagacaattggtttgatatgaatgatgaaataggtaatccttgggatatttgtaaacctttattcaaagaacattcaataaatgatttggaaaatataaaagaaattgataaaattgataaaattgataatttaaagataaaagaaaaaagtatatcaatagacttcacatcatcatcgggggacatttatttatctgctggtattgaaaattcaaaatttggtactttctttagtataggtaattaccttgatgaattaacattagcagtatctgctccatttgaagaaattgaaggttctatttatttaatcccattatctgaaatcttatccaatcaaaacacagcaataaaacaatctaattctttacaaataaaatcatcaacaaatattacatctaccttatcatctaatatccataaatttcctaatagatttggtgataagatgttcacatggaattggaatggttatgaataccttattgtatcagaacctggaacttcacaatttaaagtattctcatccggtaatttaatagcaatcttaaaatcagatcaaacaactaatattttaggtacaaatggtaaaaaacaatggaatttattatctgaagaattatatgatttaaataatgatggttatcctgatataataattggatctatatattctgataatttaggtcctcaatcaggtacagttatggtacttgatggtaagaaattttggaataaattgaataaatattcatttatgaattcttttatggatggatttaaaattattcaaattgaatcaattattttggaaactttccaaattcctaatcaattaattcaacaaaatcattatgaacattttggttcctcatatgctcaatcagataatcttatatttattggtattaactctattggttcaattacagtttttaacaaaaaaacgtataaatttattggtatcctaaatcatgataacgataatttattacttaaggataaattttataatattgaaaggaaaaattcaaaagaaactggattatacgcttataattctaatactatccttacaggtaaaattaatgataaggaatggttattaattggatcccctggtttctcttataataaaatttatcatttatcaggtattgcatttttatatattattgaacctaataataacattaaattaattaaaaaaattataccatttaatttaaatgaaaaaattgataaaagtgaatttattaattcaatgtttgcatcaaatttgaaaaaaataacaaattctttaattcttatttcaagtaatggttatgatgatggtaaaggatctttatcattacttaatttaaatgaaattttattagatgaatccaattgggataaaggtgttattgatgctaagataatagttaaaggtgataaagatataggatttacagatttcggtagtacttgtattcaatcatttaattttaatgataaaatatttttagctataagtttatctgattatttccatgattcttttggaaataataatagtttcagatctggtgcagttttactgaaaagtatataataaataaataattacactctctatatataaattatcatgacatgtctcttcaattgaaattactttcataatagtcaaaagcaagtaaaaatttaatacaacaaaaaatatattggacgagaccggagtcgaaccgatgacctttcgcttgcaaggcgaacgcgctaccaactacgccacacgcccaaaagataactgatccctagcaggatcgaactgctgatcttggcgttattagcaccacgccttaaccaactgggccaagggatcttgttgttgtgtttttctatgggtattttttcaaactaagcgtcttctaattacgtaagcaaaaaagaagtataattaccagaatactctttagttttttgaaccaataaccaaatgttatgaaaatgttgataattctaaacaaaccaaacgatatacaataaaaaacattatgtataaaataacagcatttaagaaatattaacaaacctagaaatgtaatggttgaattattaagtcagtgaaataaaattgcacaaaaatgattattgacgagccgcgaaatgaatattaaacaaatttgaaaagcatgtcatgtcaaggacattaattgatatattactttttattacaccttgtaaactgttcatataatacattctataatactctataagtagggattttgtaactggtttaatacggataacataaactttatcatattttcaatctttactatatcataatgagtttctcagcaattttgaacggaaatgttattacttttgaaaatgatatttcttcttctacctatgatagatgtattaaagacttagaaatggtagaaatcactaaaactgatgataggtttaaatggcctttttttaaacaatggttttctcttgaatttggtggttattttactacttttgacttggaagaatttttcacctctactagttacattaacaaacctaacttatttggtagacttttatggcatgctattggaaagtattttactcaagatattacgaaacttgctattaaaagaagcaatattgatgcctattattatttgaattcggaatttactcaagtaaataatgctacaaaagttatgttagtcaaaagagctttagatatttggcaatctgggagtattgaagaaatggttgaggcaatagatttggttggttattatgttccaagcataaaagaaattggtacttatattttctgttctaaattatcaagaaaagatgccgtaagtttcctgaaagaaattgattgttatgaatctaatgatactttacaacctgaatcattgtctatccaagaagttttccgaaagtataatcatttcaaatttgagaattatgatgatgatgataatgatcatgatcatgaaagtaaagatgtatcaatgcaagaggcaaatgttttacttgaaaacccaaattatactattccaaatacatatcaagaagctattaaaacaccacaagctgaacaatggaagaaagctgtattagaggagcttaatctaataaacacgaaaaaagtttatacattagttaataaatcaaaaattgctaaaggtaatttaattgttgaaagtagatgggtgtttagtgtaaaattagatccagtgacaaggaaagaaatatttgaagctagaatagtggcaaagggatttacacagaagaaaggtgtcaattatcttgaaacatattctccagttgcaagatttgaatctgtaaggttggttctttgtttatctgccatgatgaattgggatattttacacttaaatgttaaaaatgcatttttgaatggtaaaatagatcatgatgtttatttaaaagctccaaatggaacaactaaaaataataatttggtttggaagttgcaaaagagtatatatggtttgaaacaatcttcaagaatatggtatttaacagtcaaaaaaattttagttgatagtggatataaaaattcaatattagaaccatgtttattttggaagaacggtgtgatgatgttgttatatgttgatgatatcttaatttgtggaagtaataagaaattaattgaagaagctgcaaatgtattcaaaagaaattttgaaatggaagatatgggatatccaaaggtctttttaggaattaatattgaaaaaactgaggatggtttaagtttatcattagaagatcaaattaataaaatagaaaaggaatataatgttacagttactgaaaaaaagttgaatactccattggtaaaagattttgataagatggaagataattctccattattgaataaaattgaacattccaaatatagatctattattggaaaattatcatttttggctaatacagttagattagatattgcttttactgtttcttatttatcaagatttttgaacaacccaactgaattaaaaatgaaagctgctaaaagagcattacaatatgttattcaaactaaacatttcaaattgtattatcataataagagtccagttaaacttaaatatactaattttaaatgctttgatgaaacagaaactgaagagacggtaggacatccaaagaaagataaattgaatttagttttagtttcagatgcatattgggctggagataatggtgggaaaaaatcacaatcaggtaatattgttttatttaatggaaatataattaattgggagtctacaaaacaacaagttttatcaaaatcaactgctgacagtaaatatgttgctttatctgatggactaacagatgctgttagttttagaaatttattaaaagaggtatcaatttatattccatttattaatgtggttgttgataaacaatcagctctcacattgaaatctaatcaaactgaaaagagaactataaaaattgatattaagttttattatattaaaagtttagttgtagatagggttgccaaaatgaattacttaaatactatggagaatattgctgatatgttaactaagatacttgatgttacaacacataatgaattgtcaaaattaataaacaattaaaattttggcacatggccagttttttgtataatatcacttaaacaaacagaataccagagtaattcagagctatctactgtcttagtttttaccgcatttttaaaagaacaaactgtagattctttggagctcaaattaatggtatacaatgcttgtttcattaacataatttacctaaaaaaaaatcaaaaaaaaattagatttaaccgacaactgcaggattcgaacctgcgcgggcaaagcccaaaagatttctaatctttctccttaaccactcggacaaattgccaacttgtgttttaaagagtgaattgttttttatgattggtagttcttaattacgtaatacaaaaggaaagtaatattactattgaagaaactctttcaaatgaaatgtcaaaggttgcaaaacctaaaataataaatgtaaatacagggaaaataataatcgatcttaaaacaaatatcaatttcattatcgaacaccctgtaaattacaacatggatgaagcttcttcaaaaacattagcaccattatgttgtaatctaacgactctttgggcaggatccatattttacaacaacagtattaaaagaacaaactatataaactataaaataacttagattatacaaaatgtcaacagattcgatatcaaagctaggaattcttcgttctacttatacttagaattccaatctttactatcgtttctttttctgatttgtaacgtttctttttttttttttttgatttgtgagcaatacttaattctaatcagttttcaaggctcagcttaataatacaatattgttatgtattatttagtttcgcttagaattaccaatctcaacacattaatggtgtactctaatattttcccatatttgcaaggatggtattatttgactgatattcactcagattttcaggttaaagaaactacagatttcaatccgacattgttattttcaatggtggaaaaaaatgttcaaaaatggaaaattgtagaaattttcaataaaaatcaggaaatcaatattgaatcatttaaacatttttcaaaaagattttacaaagaagaatttaaggataaatttaattcagattattgggatggtaaaatagaaaaccaattggattgggaagcatgctttggttggttgggtagaatcaccaatcaaaaccatgttgattataatgaattatttgaattacaaacaggaatgttgaattcccatttttatcacccttgccaattctgcgaaggtgaaggtgggactcatcatgtcttttttaattgtaaaggcattaaaataattttaaaagaattagaaatagaaattgatctaaagaatattgttggttcaattttatcaaaagaagatgcttataaggcaaatataataatcaaattaattatatttttcaacaaacatgaaaaatttagttcttattagatccaaattagatggaaaagattgagaataatcaaacagaaataatttacatttagtttagtatatgaagatatattgaattgatgaagcatgaataatatatgcgtataagtaatcaatctgtataaaattgtatattttaatgaaattaatgtaaaaaaaaaaaacgtaagaataaaactcattatttttttttttcaattgtaaagtctgttctaatctactaaattttgttgtaatctaataattctagatgcaaagtccattttatgacaacagtaaaagttatttaaagaaactaaataaaatataaatgaataaattaaatacataactaatgaaagaacttgataaaaggaacaaatacaacgaagaattccaatctttaccgacgtttctttttctgatttgcgagcaatacttaactctaatcagtttttaaggctcaaatcaataatacaatattattatgtattatttagttttgcttagaattaccaatctcaacagtatctgaatgtatgtttgcatgcaattaaatgtttagtatctggatctttgataaatcttgataagtatgaggcagcatacgataaatctgtttgaactgtactagcagcaaacaacaacttccctaccatgctgccgaatgctgtagcatcagattctgaaagtttagaaccatcatcaatagaattaacatttgaaggaagtgatctagaaacagcattacatccagtcataccaaaatcttttaacgcattttttaaatatttattaagatgcagagatataccattcaaactctgcaaagttttcatacccaaaaaggtattaaccaaacccaaatccttcattttaaaacttgaattcaacaacaatttaacctgatcaattagggccatattattagtcaaaattaataaatcatcaacatatagtgcaactaaaataacttcatcattgacaattttggaatataaaccaaattcagataatgaccgtttaaaacctgcagacatcattacattgttaattttcatattcaaacaaagaggagcctgtttcaaaccataaagactcttacaaagacgaaataccatattttcctgaagcattaacaccacctggaaccttcatataaatttcttcttcaagatcaccattaagaaaggctgttgtaacatccatttgatgtaccaccaatttgaagtgtacagcaatagcaaataagattctaatactttcatatctaaccacaggactaaaagtttcaccataatcaattccttgaacttgtctaaatccttgagctgctaaccgtgctttaaaagttggtggattagtattatctttgatattaaacacccaacgacatccaattgtccttctatgtgaaggcagttcaactatatcccatgtatgattttctttatgatttctttttaatggcaactttccaaaattcagcatcaggtgaattcatggcttgcttgaaagttgtaggaattgaatttaaagctgatggtatagaagcatctttaatgaccttgaaaatagcaccaagaaattttttaactctcttgggaggggggggcgttcagtgtcagtaacagccgaaattgatcttaccaatggaaaagaggacatcagtaagttgattaatcaagtctaaatctacttgtacaattggaagattatcagcaatttcagaataaatatcatcgatataacgaagatcaacctctgcttgatcaaaacctaattatggaacaacacatggagcggcagatggaacaacattttcattttgaatttcaattgaattttcatgttaaatttcattagagatattaagatcatcatttgaagaattagcactgacagtatcgtcagaaacaacagtagttaattcagttgttggagatacagtaggtgatgtagattgaacagagacaatggatttctcagaggcaacatattctaacaaaggtgacgatttaagttcggatctagttgagtttgaagtagtattaggatcatctgatggaacatagctagaaccagtatcagtaacagaaatgtcaacaactaaaggaagaacagcaccaccagtttcagcattaaaaataatgtcagaagaaggtaacatattagaaacaggccgatctgtagatttcttatatggaaataggttgtcattaaacttaacattattggaaataacgacatcattgagtgaaggagtaaaacacctataagctttatgaagggaactaaaaccaactaaaccaccagaaatagaagcaggagcaaatgaagatgttcttttctcaggtggaactaaaacataacaagcaacaccaaaaggatgaataatatcataatttggtttatactttcaaaaggagatttaccattaagattattaacaggatacctgttgattaaatattcagcagttttaacaacttcagatcaaaaattttcaggtaaaccagatgaaaacaacaaagtgcgaaccttttcttggatggttctatgttttctttcaacaacaccattttgagatgaattataaggaacagtgatttgatgagtaattcccttttcaacacaataagcatccatttcatcatttcataattcgccaccattgtctgttctcaaagttgcagctttgaatcttttagaggcaaataaattttcagcagtttaaataaatgattttatcaactgaacagtatctgatttcttttgaattgcgataacatgagtccttctggaataatcatcaacaatatttaagaaaaactgtttatcattagtgcccttaactgggaatgaaccaaaaacagtagcataaattaattgaagtggagcactgttgaattgaggttatcctatttgtaaagttcattgataatatagataaaatataatttgtattgttatttaaataagataaacaaaagtaaaataaataatataaagaaaagaagaggaaatacaaataataaaagtgggaatacatgctcccttatatagtaataaaaaatgaaactttgtggttttgtagctttatgaaattgtggcttctgtaactttttaaaatatgtttagattaaccatctccacaagcactagctggataagtagttgatagtttgggatgaacttttgccatcttaccagctgcacatgacaaacacttttcaacagatggaccacctgaataacctaataattttaaggttgcaggagaaggatgacctaattaaaagtgcattaattcagcattgaccgacttgacagtaaaagtctaagcacataatcaaagaaatacaatgaacctttggtagaaccaatctgtaatttagaatcaaatccatatggaataaaataaactttgtattcagaaaattgaaaaacaccaaacttagatgctttctttactgataaaatattttgagtaccatcaggtacataatgaacctcatttaaagtaatttcatggccagtagatggatgaactagcttgactctgtactaatcccttcaacatctaagggttcttcagtattaccagaaactttaccactaataattttaaaatcaacaaattgatctttgtgagcagcaatatgaatattggatccagaatctaacaaatattttcttgacaaaggcacctaaacatttgaagccacccatgcaaaaccatttgaagtggtagtagtgaatgctgatcaaccttgttttgaagcattagatgcagaggcaggagcaggagcagtacaatctctagcatgtaattttatttcgatttcttttaaagtttctcttaaatttgttattattgttcttgaccataaaagtttgaagaacagttgaactaaaatctttaagtgccacttcaacagctgataatgtaaatcaggtgcagtacaatctaaaactttagcgtaaaataatcccatcatttgagtaatttcagggatcgataacaaacatttttgaaaatagctaaagcttcaccagcagaagtgcctttagttcctggcatcaacagtagaatcgaccaaattggataattctctaacagagatgtatgaatatcttcttctaattaacactaatagatcaaaagtaacagcagcatccgtttcaaacttatcaaggatagttggagcaacattacagtgcaaaattgattgaacaattaaggttagaataccttgaatttgggcacttaagacgttagtagtatcaggagttaacatcaaatctcccgaagcaaaataaacatcaacacttgcaccaacagtgtggccaacattctaccaacatagtttcccattttggatatttagggaatatagtcgagatttgacccataacctgttgtaatatactaactctaaatgcagcgtccactatcaacaacagtataagttatttaaactaaataaaatataaataattaaaaactaataagaaaaactctagaaaagaagtattattaaacattcatgggcaggttcttaaataatctttgttcatttttttttataatagtggatacttttggttccttatttgaagatttttttcttgcattaaacttttctttaattgtagttttactggctttgatttttttcttacaatttatataaattttgctaattttgactttgcaagatattttcatctcaagattagagaattaaaaaaatttagacccgttactaagcttactagaaatttttacaaagattggattgttgaggtgagatcatatgctattgacaaatcattaatcgaatttatcaaggaacattttttaacaacttacaaacaggttccaatctgtgcgcatttggttcattctacagagtttttattaatttatacttttaacaaattttatgcctttttagatactgttccaaacgttgttatgcctgagagaactgaggtcaatgctttgcaaaccaacttttgttctcgtttcaatcatggtaagaagagttttcccaactaaaccaagaaattttaacaatcaacaaaagaaatttactacctattggtgtaaaacttgttcttgtttcaaatgtaagaaggcaagaaatgaatattactcaaaggaaggtaagaaatcttattcaaagaataaaaaattcaatgctattaatgttgattgggatgtggacggttgcccttatctttctcaagaattaaatgaattatcaattgaagaaactgaagatgttgatgaattagaacaatttattaaagaaacgaggttagtttagatttagctgatggtttagatggtattgaaggtatgaatgatgaattcgtttccttcagcatgttagatgcgaggcaacgttactaaacaaggtgaaatcttgcttgattctggtgctactagaaatttggtttaccaagcttgtttagatacactaccaggaaacgttcaacttgttaaaatatttgatgctgaaactaattacacagttactgctgcttttggtgattcttatcaatgttctgaaattgcaactttaaaaatttattttactaatgataaattcattctgtcagacttcattattattcctaattcgaatgaaagaaaattaattattggcagaaaacttttacatcagttgctgtacagactagatgaaaaccatcaatatattacagtgatgggagaagagttggtaattgatgataatttttctgttcgtttatttcaagttgttgttgaaaacaagtttttaattgatgattatgttaaaaaatatcctgatttattttctgataaattaactgttattccaaaacacaattttaagtacaaggtttgtttagaaggttttgattatcataaaccaaaaccattttacagtaatgctgtgcaatcaaaacatattgagaagtttattcaagatggtattgatgacaatgttttaattcaatctgatgatccaaatgaattagttgctttagctccagtgtttccaattgttcaaaaagataaggttagagtggttactgattttcgtaaaattaatttatgtttaaaatatcaagatgaagcaattccaccgattttggttttaattcaaaatttggcaacttattcctgtttttcaacattggatttaaaaagtgcatactttaatgtacctttacatgaagacggttctcctattggtattacaaccatttttggtaatttcaaatttcaacgtttaccttttggtttagcctcagctactgcagttcttactcgttttatgagaagtatcttaatgaatttagattatgataaaaaaacaaagaaagtgcctagttctatttcaaaagatattttacagaagaattttgaactcattcgaaaatcaattattaattctgttggtctacaattgtttgatccttccaaaaaggtttttattattacggatgcatctttaactggtgttggtggtatgattctacaagaacatttgtcaaggaagaataagttggtccctattagtttcttttcgaaaagttttactgttactcaatctaagtacacagttttggaaagagaattattaggaattcttttggctttgtctaacaattatctgttgctttcgaacgagattgttgtttatactgatcatcaagctttggttagtatttctcaaaaacattcgatgttggacaagcgagtcttaaaatttttggaaacattatcaacttatcctgttgttattaaatatttgctcggtaagaaaaatcatgctgattttttgagtcgtttttgtgttgataaacaaccggaattgaatttagacgttttaaataatgaattcaatgctgtaagagtgactagatttgctgatgaattggaaaacccttttagtagaagaaatcaaaagttatttaatggtttggttgatgatgatttgaaaaggatgttaatgttgttgaaatcaaatggtgttctagatagtcgttacaatgaagtaaaaaataattttcaattagtcaatgatgaattaaaatttgtttatgaaaataaaatattttcaattatcaaaattgatgaatgtatgaaattatttgctgagtggcacgctaaattccatggttctccaattgttttgttggatttgttgttagatgaaggtttattttgtccatctgctcagatgttggcaacggcagaagtaaaaaattgcaaacattgtggtttgtttatttcttttaagtctttgcctgcaccagtacaaaaggtgaaaactccacaatttggtgagctatggcacattgattttattggaccgctaaaaggtatgagggtacacccaacgaaatatctgaccatggtacgatatatgttggtttgtgttgaatatgttagcagttattgttttgctgctcctaccaattcaacggaatcggatacggtttgtatggtgttaaattaattatttggttattttccagtacctgggacaattttaagcgataatgcttctaattttgtttcatcggaggtaaaacgttttgctgaagaatttggtattaaatggagattatcaagtgtttattatcctcaagcaaacagtagagtggaaagagttaatggtttgataaagaaggtgttaaagagtttgaatcctgatatggaaaaatggccattatatgcactacaaacaattaacatttacaataatacaacaactattttcaatactcttcaccttcccaattgatgtttggcatttctacagtcaataaattgaagaattcaaagatgctaacggtggttcaaaaggcaatggaatcaattcaacaacatttgtttgaaattgatgctgcaatccttcgcaataaacaattacaaaaagtttttgcaaacagggaggtggtttcctctagaagccatgacgcaagatcgagattaaaattgttaaatgatgattaaggaaatcacaatagttatttgttaggtgaatttgcgcttgtgaagaaatttagtaagatgcacaaaacagatccatcttacaaaggtccctaaattatagctcaaattaatgacaaaaattcttacaaattaaaagatttacaagatagattgttaaaaccatcttacaatattcaacaactaagaccatgttttcgattttatggatctccatttagatctatttcagattattctcaagagtttggatataaagaaaggaaatgttataggaaagtatttgaaaaggctgctgaagaagattggtcgaagaggggggtatttgtgataccgagatcacaattcaatattagtttagacgcgacttcgcgtctgagtgtttgtcgtccattattaacatgaacaacatttgttatttgttatttgtatttacttatttataggttctattagattttcttaatagaacaagaactttacttttaaacattaatttatattacataatagatccctactattattatattatgatattaaacatatttgtattgaaacttagataaaagttatttacataatatttcttagaaatctgctcttggtcgtgggagagaaatttaagaagaaatcatagtatctaattaagcttttattcaaatatggagtaagtccgaaatattattaaatgacaatctcatgccacttttctaattggtactttgatcatttcttttactcgtttgatagagctatatcatactattaaataggactgtttctaccgagtgggatcctttaatttatttatttatttatattaaaatttattaatccccctttgtttttctttattgtacattatcccactagaaagatcatattaaaaatattaaaaaaaacagaaaagaaaagaatagaaaaacaaagctgaagccaagcaaaaatgtcgtatttaggtccaaaatcttttagtactatacctttaacctcttcaaatctagcatatctcaataaaaaccattcagatatgaattctacaacttcaaatgaaaattctaataatattaataatgttaataccccagtaactattcaaatcaacaataataatcctataggtgaagcaaatattaatgatcacgatgatgataaaaatatcacttttaatcaatcaggagattttaaatcattaacatcaaatcataacaaacatcaattagaaactactccaacaatagattcatcttcaaactctttttcatccctgattgatcaatctttaaaatcaatctactttcaattcctaccttatgaagaagatttttgaagtttactttctttcaacatgctgagttttaaatttctgtcggtaatatttttacctttatcatctctaattctcaaattgtttactttgaatgactattcagactttttatatctatgtttctaatattataagctgacatatagtctcaccgtttgattctacaatggaagtactttttgtaactaactccacagttctttgataccagtcacgaggagaatttgtattcctaggattcttgtcatcaaaatatcatctaaactttcagtgataagttttagccaactttcacactctttggtgtggtcttttggtttatttcttttctttctttatctgcttttttttaatcaactgttcaagctgaacattttccgcagcatctaagttactcatctttgtctttgtaatgtcagctttttggctttaccctataatgaataggcaaactcacaggttaaccttaatgcaacttttaaatggaagtattgtgcttctttagccatatcatttgaaactaaatttggtttaatgtcaatatcaatatcattcttattatttttattgattgattgattgattgatttctgattttatcaatcatttcatcacaagcattattcattataacataattaaaaacattattacgtttatcactcaaagatctttcattgatatgttttcttgacttcctataagtttaagcaatgtgagttgtaccaactgtataaattttatttgataaaactttatggaaactataattaataggctttgaattattagccttaatacttttactaccccaaagttgtttaatagattcatatctattggcaagaattataagtttggtaccaaatcatcattataagtttggtaccaaattttatttgaaaaacatcatcataagttttagctaaatttaaaagttgaatacaaggtcaatcttcctatctttttgcttttgaaattataattttgaaaccattaaaatttagaaatggagtataaaccatatttgaattttggttggttttggagttatgaaggaatcaatggttgtagcaaaaatgaaaccaacagataaacatacaagaaatatccatatcatataacctatttgaaacttaagttgatgtatggaatacaaaaaattaattacagcatcatacatgattgggaagcaactcaaagcaaggccaagcgaagaaaagaatactacgagaaagtaataataaaagtacagaataaaagtgtttcttttagtaagtggaaagtttgagtgtagttgtatttgttgttattgttggggtgtagctaggtgtcagaagaaagaaagaaagaaagaaaggaggaaagaaggtaaaacattcaaaaaacaaaatgaaaatataagttgctatcactttataagagaagacaattcttttttttggtgcctcacagtaattcaatgggtacctcgtattgcctctcttaatctcctctttttgttttcattgttatttttctttatatatcctctaataagattattatattgtaataaatatgactgtaaataagtaagtgagtaataaattttattactataggcttttagttctgagcaattggttactatacttataactattcgaattatagctgtttttttcaactataagctataaagttaaacggttcaatttttcaagcttgttgttgagatggctaatctaaaacatattttttgagccacggtttgaagagccacggtttcaaaggccgcaaagccacaaagccacaaagatttattttttattactatataagggagagcatgtattcccacttttattaattgtgtttcctcttcttttctttatattatttattttacttttgtttatgttatttaaataaaattattattataactaatatggattttacaactaggataatcttaattcaacacttgtcaattcagttacaatagtattgaattaattcacataatatattgtatcaatgcctgaatatacttctatgtttcgaaaacaaaatatatgaccaattcatgctcataattcatctaaaaccatttctgcttcaatttaaattttaaattctaattcgaaagttagtttaaaatcaaatatggtagtatagtgacactctctcaactttaaaagaattggcttgtcaatatgatatcaccacaaacggtagaattagtatacccaatgtttagtgtgcttatgcaaaccagcaatattcccattgatatagcaaattcaattttcagtcttggaaatttgttgatttatccttattaaatgatagtaatttggtatctggattatccctaattataataaatggtatacacaaacgtaatattaaaacattttaagattattatgttttacaaataacggttccaacaaattcaacattattattatcatcttcattgtcatcatcttttttatttaaatttaagaatttcaaagattatacaacttttttaaatacaacaatcgcaaagaaaaaattacatcaaagtggtcaatagtttcacaataatccaaatactaaaatagtcctgaagaggatatattagtaagcaaattaaatatttatgctccaatacctaatgatattgacgatatagaaataaatacgaatccaataaatccattatatacaagagaagaaatcttgaaatcttttaaaagagcagaatatttgggaaataaatttattaaagatattcatttaagaaatgaacggacgctatcacaggaaataatggagtcacaatttgtcgactttttgaaaagaattgattgaaattgaattgccaatgtcaaataataatgatattaaattattaattaaaaaatcaaataatagagatacatagaaggtgataattcagatgcgacagtaggtttatattttgtcaccttgggtgatttagccggtaaagtcaattaattaagaagaacgcctatttatataatttaagaaatcaagttattgaagatttaacagtcaatttggatatatttgaaaataatatacttttaactaacaaatataaaagttttgaaaatattctaaaacttctaaaatagagatgcttattttatacagtacaaccaaaagtttagaattctggccaacagtattacttgatttttgtcagagtttacaaaaggaagaagaatatttaaaaactttaattaagtatgagctctcaaattctaatatattacttaaaaatcaagaacaacaacaagtcttatttaaattcatacaattttccgtcgtaacccaattttatcaaagttattagaaaaattcacattaagagtcggacacatgaatatttggaaaacttattgagtgaatctattgctaaaattcaataagaaaaatagaacctgagtcatatgaggaaagtcatcaaataacatatcttgaatatttgtgaaatagaatttataattcatctaatgatataccatcaaatattaagaaacaatgaaaaatcttaagaatgaatgttgaattatcatttgagacaaacatgaaaaataacgggccagatgatgcaaaatttaaagatgtttcataatatcatgttgagattggtaattctaagcgaaactgaataatacataataatattgtattattaagttgaaccttaaaaactgaatacatttaagtattgctcccaaatcagaaaaagaattgtttgtgaaatgttgtaaacagaaaaagaaacgagaacattaatgttataaagcagaaaagtaacgcaagtgaaatgaaacgatagttaacgttggaattctaagtataagtagaacgaagaattcctaggtttaatatcgagtctgttgatattttgtataatcttagttatgttatagtttatatagtttgttcttttaatactgttgttgttgtaaaatatggatcctgcccaaagagtcgttagattacaacagtattgatgtaactgaaggtgttaatagacaatcaataactgaaacaaaggtacctactaaacttgcaggcactccatcatacctgaataattcgttttaaaaacaatggctctttgtgatgccacaggtgcaccaaatttgtttttaacagttaccatgaactcagcacttgcaatggaactgggagactctattcctcagtacaataaatctagagaaccggcaaaggatttagctgccagaacattccaacaaactgtccgtggtctcgataaaaatcttcacaagattttagggttggaaattgtatctaggtcatggatcactgaattagtggaagaattctaccacctagaggtgaaggtgataaaaatattgttttatatgatccaattttactgaaaaagtatagatgtcatgtaaatttagattttgctggttcagcagctgttgtaaaatacttgttcaaatacatggcctaaagagctgatactcttggaatgagaagagaacatgttgtggatgatggtacacgaaatacattacctcgtgataaaatcaaagaatttattcgaggtagatatatcagtgagatgctctcaatgctccattttgcgggtattgggccacctatacttgcccttcatgcccacacagaaactgggttttaaaacaagaaactatacaagttttttaaaaatattgatgaagcggccttgaaaacgccgtttttgtatgaagacatcaacaatatattcagatgggatctaaacaaaaatgaatgggttgcacgtataagaaaatctgatgctttagcttttgttccatctgttttatgtatggtaacatacagagaccagtattatgaaagttgtagaaagtccaaaatattttgatgatttcaagtgtggctattaaacttacaaagcggcatgcaatgcaaaaggtcttatagaaaatgatgatgagtatgttcaatgtgttagaaatatcagaggcactcctgcccgtttttgttcgtttcttaatatgttattgatcaataattgtattgttgaacccatctaaatttattactgttgttcattttcatttaacagaagatttatcagataaacatttcgggttttatggcaacatcagcatcagaaatagcatcaccaggcaaaaaatcagtaccagcagcaaatggagtagaaacaggattgcaatcttgcatattaaaatcaaccaaataatcattgagatagtgatgtaaagataaaccaacacttccttcagattgatgtaaattcataccaagaaacctagaagcaacaccgagatctttcatcttataatgagaagagagaagacctttaacatcagaaatagcagcaggattatttgaacaaattaataaatcatcaacataaagagcaacaataacaatagagccaaaaaacaccttagtataaataccatattcatttgaacacctttgaaagtcagcagacaataaaacttgattgatagcttgattccaacaaaaaggagcttgttttaaaccataaagactcttattaagcttgcaaaccataccagaaggagcatcaacaccatcaggaaccatcatataaatttcttcattcaaagaaccattcaaaaatgcagttgaaacatccatttgatgaatctttaagtcaaattgagctgagatagcaagaacaattctaatactttcatacctgacaactggggaaaatgtttcaaaataatctaaaccataaacttgcctaaaaccttgagcaactaatctagctttgtaagtaggtggtgatgttgaatctttaatagtgaaaacccagcgacaaccaatagcacgacgaccagcaggaagaggaaccaaagaccaagtagtattcaattgatgagcatctaataccgtttggatagcagataaccaaaaggatctctgatgtgaattaacagcctgattaaaagtagttggtaaagcagatgaaacagtagtagatgcagaaaaagcagtgtgaatggcattggaacctaaaaataatgctttggaacgcttaggaactgaatcagcaatatcagagagctgagacaaggacctttgcattggaacaatagcagatggctgagctggagcaagtgctggtgatgatggtgtagtagatgatgtagatgatgaagcaagtgtttctggtttgaaacatggcttttgcagtggtggttgagtaatagatgctgaagtggtatcacttctgtaacgacgtaatggaagtaaagatggttcaataggaacttgatgaacttcatcataaactggataagcaaagtcattaggaatagaatcaatttcttcttcatcaccagatgaaactaatttgtcttcatcaggaaaaaatttggaaacatcattatcttcttgtgaaataatattatcaatagcatcagaaattggaacagaggcaacagtttcaggaacactaggagagttaggaaccatttcaatattatctggaacaaccccagaagattgcatcataggtgaagaagaagcagatactggagcagatgatgatgatgatgatgatgatgatggtgatgatgatgaagagcttgataatgaagctggagatgatggtgatgatgaaatagttaaatgagcatccgaagtggatgaggaggaaggtgctggtgaagaaggtgctggggattgaaccggtgaatgattaataataagaggttcagcagaattagaagcaccagatggaataacaggaacaccaccagcattaccaccatagaaaatatctgaaggagaaacatcctccataataggaatattgtttttagagtctaacattggaaaataggaatcatcaaatttgacattatttgagacaacaacatcttgaatcctaggaataaaatccctataagctttatgtgctggactatatccaacaaaaataccagcaactgagaccggtgaaaaaatgttttccctcttttcctttggaattaataccatgcatttgcaaccaaaagaatgaaaaattgaataattaggaaccctacccatccataattcgtaagcagtcttaccattgagaacatcagatggatatctattgataataaactcagcggttttaacagcttcagaccaaaaattaaattgtaaaccagattcagaaaggagagttcttgctttttcttgaacagtacgatgttttctttcagcaacaccattttgagatgaattgtatggaacagtaagttgatgagtaatacctttatcttgtaaatagtgttttatatcattgttgcaaaattcagtaccattatcagttctaagaataccaactttatagcctttggatgaaaattgagtttcagaaaaattaataaattgtttaatagcagtagaagctgcagatttggttgccaaaggtaaaattgaacaccatctggaaaactcatcaacaattgttaaaaaatacctttcaccagataacccaggaacattaatgggaccacaaacatcagaatgaattaattgaagaggatgaattgctttaaaggtagatgattttggaaaaaccttagtcattttaccagcagaacaatgatcacaaattttgaactcagaggaaggagagtagcccaattccctcataaccctaccaaatggatgacccaatctggaatgcatattcaagttgtttgcaattaaggagtagtttgcaggaataattggtgaaaaaataaattgatataaagtagctggaaaatattcaccaataattgtaccatcttgcatgtaacagtatctattatcaaaggaaaatctagcgccagtgtttctagtgatcattttgatagaaattaaatttcttgaactattaggaacataagcaacattgctaattgaaattctttgaccattatgaccattgaaaataacagtacctctacccataatttgtaaattatcaccagaaataccagaaacagtttcaacagaagtagctgaaacataatcactaaaatgttcaaagttcttagtcatatgaagattagcaccagaatcaagagtataagtatcactaacatgaacaggtgcagaaacatgccaagcaacatcactactagcaccttcaacattattaccatttgctggtttagtagaaacaggaacagcagcagtacaatttggagaaatatgaccagcttgttgacatcttctgcagataacatcctttgaatttttaggttttctgtttctagctttaggtttggtagcaacaaaagcttgagcagaaggagcaccatttggagatgaagaggtagcaatatctttaagagatgcttcaatagtgttgagatattaatctaaactaggattcgaacccgtgactataagaatcaaaacctttagaagaagaaaccctcaacaagaatttgaaaccctcaccataagaagagaaaccctcatcaagaagttaaaaccctcaccttgaaaaatgaagtttttcaaagtgaaaatcttattatataaaggaacatgtttcccacttttataattttttatttcctcttattttctttatattatttattttacttttgtttatattatttattttacttttgtttatcttatttaaataacaatacaaactatattttaacttgcttattaaaatggattttgctaatagaattacccttatacaacaaatagctgataaactaatttggggatcagcagcatctaaaattctggaattaacagatggatcacaaaacatttgaagatataaaagacctaataaatgatcaatggtcataccatgagtaaattgagacctcatggtttttaaaaataataatcctttgtcaagtggcatagaggatgatttagttaacttgtcaaccattgaataaagttgacgagcagacaatctagaataatctcttctaattgctgctaataaggcagaaccagacaagccttcacattgataattggaaataatgttaccatcaacggtattaataaggacaacttgaagggcccggttaagataaaatgttaattgaacaacactggggtcatcggccggagtatccggtgagactaataaatcaccgtcagtaaaaaattccaataaaccggacccaaaggtagctaaaatggagcggacaccaacatcccaattgtgataattttcagctgattttaaagtgttaatggagctctttggacacaagtgagaacagggctcataacctgttgtattgagggtatcctatttgcaaagtccatattagttataataataattgtattgttatttaaataagataaacaaaagtaaaataaataatataaagaaaataagaggaaataaaaaattataaaagtgggaaacatgttcctttatataataagattttcactttgaaaaactttatttttcaaggtgagggtttcaacttcttgatgagggtttctcttcttatggtgagggtttcaaattcttgttgagggtttcttcttctaaaggttttgattcttatagtcacgggttcgaatcctagtttagattaatatctcaacaaataccagtctacaagacaaggaggaagaaaattaaggaagatgttatttattaacagtgttcgcagaattaaatagggatgctcccttttcaaacttgcacttcaagaaagaagacgagaggttggtagcacaatttgttgctccatcgttgctatatagcgtgcaagatgtaggcatttcaccagaatactttaaaaacaccgacacttcaattgatgaaataaatgagcgggtttctcgtttgacaacaaagcaaaaggaacattatgatactgtttgcaacagagtggctgacagggactctattgataataacctttttttcttgacgctctagctggcagtgggaaaacttttttattgaacgttatgatcaaaagtttaaaaatattttccccttctctgtacttctataaaattaataccagtaaaaaattacaagaaagaaataaagaacagaatggttagtggattataaattcatgataaagagaatttatccagccgccttacgttcgattactagtaaatgatgatacgaaattagagagtgcgtgtaagaattgtgatttagtttatttgccattcctttgacggaggaaattagtatgttttaatctcctacagtaaattgcaccgccactctaattcagagaaatattgtccgtaattgttcaaccatattttgggatgagataccgatgactccaaaatctgtaattttagctgttgataaacttttaagggaagaaaagggaattgatgtttcttttgggggttgtgtacttgtttatgccggtgattttcgtcaatttttacctgttgctaagggtaatcctacattatatgaagtttacagaaaaccatttttatgtctttcatatgcagataagattaagtatcttaaattaagtgaaaatataagaatcatgtactctgtggcactagaagatagagaaagaaggcaagctcaagcaacagctcttttgaagttgggaatgggaccaaaattaccaaatggtaaaggttttgaaaagatgcaagatttaggtgtggttgattcacagtaatatacgacttcaagaaaatcatattttttaacagatgtttacactacaaatattcttaataatacggggcctcttaataactcacactcttcaaacgatttatgtaaaatgtatgcttcagggtgtgtgctaattcctaaaaatttggatgttgattgaattaacaaaataatgttgaggagaatcaaaaatgatccctgtctcgttaaatcgtatcaaaaaattattgttggttgttcaaattctttgatggacgttttttccgtttggcaagatagagttgatagtcatagtaagactggatttcctgaacatatattgaaactaaaattcggttgtccagttgtcttgatacggaatatagatgcagtaagaggtttggttaacggtaccagaatgagtgtattgaatatcagaaatgatgttaatggtatgtggttaaaatgccgcattctgtctggaaaacataaaaataccgaagttgaaattcctatagttattttttatcatccaccttgtgaaatggtcccagtataattcacccggagacaatttccagtaagagtatgcttttccatgacggctatgaaagcgcaaggtcaaacttccaatagtaagcttggaatttaccttccaaatgatgattttagtcatggtcaactttatgtcccattatctcgttgtacaaatatcgacaatgtcaggttctgtttaaaagggatctgctgtcaagaaacaaaatactgaatgttgtttgtgcagctgttactggaaggttggttgcggaagaatctaaaattgcaaatgaaagtacttactctgtcaactcggagtttgactcgattattttcgaaggaactgttgctggaatggctaatgtggtcgaggaagatgattataaactatatggatcagttgtttttaatgagacagatgatgatttggaggatgatatagaaggaatatttagctctgaacaccaccctacggtttatgtattatttagttttgcttagaattaccaacctcaacagaaataacaagtttctcttcaaagtctgtataatttggcacattaagcgtcggtgggccaagcgacgcaacactgacgcgaccgcttttttgttgcatatttgttatttaaattgttgcaatctaacgactctttgggcaggattcatagtgttgtgcctataatattaactgataatattattgtgccgactaacaatggcttttaaaatgaaaatcaaaactaaaatcaaacagccaacataaaatgagttaaattaatttgtgctgattgccaaaatattaatttacacttttgtttgaaacaacttataaaagtgctggcatactgaacttgcagaatggaatgcactgcaaacggccagctgcaaaatgtattcatgtatataacgagacctttgaaatgtcaagaaggtataagagaattttttttaatttaagatactttagtataccttgtatataatgcacaccccgagaagcaccatttttttccaaaaatttgaccaattttcaaactttgactatttatagctaaataactacgtatttacaaatgtatagtatcactgtaaatctggaatttaggagactctaaccatagtgtctaggtataattcaatttttaccattgtaaatgtaattgatggtggcttaacaattcaaatttgtcagtaaagttgaaaatctcaaaattttaaactcggactacgtaataaaaataataaaaatatttacagctgcttttctaatgatgatgcaccgctttgttaaattatcataatacccccttctttgtttctttactttgtctccctgatgcccttctttccacaacttaaaccggatatcagtgacaaaacatttatgtgtaaaggcacgttgataaaacttttaaacattgacatgaatgcgtgttaagttattgttcatttcaatttatctttgtgttgtatgagggtaattctatttgaaaaatccattgctaaagtaaaataaatgatataaataaaagaagaggaaatacaaataataaaagtgggaatacatgttcccttatatagtaatgaaaaataaaattttgaggcattttaattgaggctaagttgaggcatttaattgaggcatttaattgaggcttagttgaggcttagaaattatgtttagattaaccatatcaacactttggatttattgaacaactattacttggcaaaatagttttaacattagttagctgttacaatttaacttattcaaccccaatgaaataaagcctttgaactatcacagattgatattgtaaaaatatctcattgataagaaacttattcattgcaacttcaaagcgcaatggctgtctgtaggggaaatgcagaaaatgtttcattgttggcgaacttgctcaatttttttcttacttactgcttaataacataataatatgacaaggaaaagaaaagtttatgctttgttgctgtttgatattgcttatttaatgttacttattagatattctttttttttattttaccaagtcgttgatatacttcaatgccgttatagtgtttattacttgatggtatgattttagctgtattgttacttcgatgttttagttgctattttgcaaaggtattcttactatttttacaagtgtgttctcactacttttacagattttcatcaaaaggaatatccgaatagatactgaaactataagttaattaacatctaagacgtattgttgacacttcaatgtatcttctgttgcatttcttctgttaattaagctaccagtccactgtatccctacttataatatgttttttagcgatttaagaaaattttcctaaatcctaagtctatggtttccccctcaccagtatctcataaatatcacatttgtagccgcgcttttcctctatccaatcatgtacttagtttttgttttgactaagtattggtggagttataaacgtttttagtttgaaatttgcgttttttaacaaagtccagtaatatgggcattaaccttgagcactttggacatggataattgtaatctcctctcttggttgtaccggaaactttacaaacatattgtttaccgattgtttaggatttgaaaaaaggttgctgaagttagtgatttttttggtcctatttttgagcacttatttttgatttttgaaaaattaggatttaaatcaaaaaatgtggctccacagtgcactaaatatcttggattttttgtagctgttctattgaaaacataaaactgtaccggagttaattctaaattactatgtaaaaacggtgttaagtaacaacaaaaggtgtgtcgtgatttttggtgaaaaaagcttttttcagattacgtaagattataaatttgtgataagtagggattcgcatatttcccgaagggaaatgtttaactacgcctatatattttattataacctatttgagtgggctgataagtagtcacttccgcactatgtttaagaggaaattgtcaatttagcaacaaagaagaagggtgtcttctgaaaaaagaaagtctttttattagatttctctgctattgcatgcatcaattattcaacgtctacatatactccggcatcgaacggtgtcgctgagagggtaaacttaactgtcttaaataatgtaagatcgatgttacttagttcgtcgttgccatcctatttctggatagaagttgcaaattattttatattagagaccacgtatggaatggatgatgattcagaagatgaagatcacgaattttatttttcactagaaaactgtaatctgttagatctcgctgctgtaaatgaaaatcaattaaaaggacgtcgaactcatcatgggtgcgtattagactttgaaaataagattattatataaattatacaaaatgacacaaaacgaacacaaatttctactcatgaataagttaaagtcaaggataatggaagataataatgttgggatggttaattaaacatatttttgagccgcagtttgaagagccacggtttaaaaggccgtaaagcctgtaaaaagtcacaaagccacaaagattcattttttattactatataagggagcatgtattcccacttttattatttgtatttcctcttcttcttttcttaatactatttattttactttggcttatcttatttgaacaacaatacaaattatattttaacttacttactaaaatggattttacaaatagaattaccctaataacagttataaccaattcaaataataattcgagtcaaattacctatggcaatagttccaactgtgcaaccagtaactcaaaaagtgagtcaactattaagtctaaggcaacaaaggtagaggacacccatcaacataacctcttggtccaattaaaactggattaagtcaaaagaaggtctgttcttcaaaacacattactacctttgaagagatccaatggaaaattagtcaaaccaaaagtttgctctccaaccaaagaaaaaaatcaagtagcaaaaaatttataaacctaagggcaacaacagaaacattaatttaaggaaaaacggtgaaattagctaaggagtctggcaataagaagaatatacaagtgaataagaaggatattatcctgctggaaaattacgttttattattaaacaaaccaccaaaccaacttgttttttctaagctaattgcccaaccaacacatgctgttacaaaaccaaaataaataagaaatccactagtaaagaagataaatcagaacaatgccttaccaaaagatacctccaaaactcaaaaaaacacgcctgtaagacggcagtgcgcgtctcaatgctaagaatgttaaattgactactcgtattcatccagtattagttaataaaataacaacaggtttaccaataactccaaagaagcaatttctaaaaacttaaaatgctgcagtgaaatctccggattcggaataatggttatctttaattaaaaataaatttgattccaatgaggccacaagatacttggaatgcaaaaccaataattatattattataattactaaagaatccacacaaaaggggtattcaatgaaaaacctggcaatattcataaggcacgtttggtagctagatgtgattgtgatgttcaatcaattagcacttattcagaaacatatttaccaacattacgtccagaggtcgccagaaggatacttgctcaagcatgccatttcaaatgtattacaaccaatatgatttcaaaactgcatacccagaaagattatgcacctggaaatttcaaatacactaataaaatttggttataaaaaactggcatgatcgtaagtactaagaacataaaattaatgacagaatcaaaactaataaaatacaattaaccaagaagaatacattgcatctattatagatgaatacaatatcaaatggaatgctaagacagaatcagaactcccgcctggttattattttaatgatcaaatcacaatcattggaatttaaaacttcaaacaacacacgacttgaaatctacatagactgttaaagaaagactaactaagccatatcatcatggtcgctcatgttccggaagacaaacaagtagctgatattttaactaaattagttacaataaaaattattaatgaattggttccagttgtctttttgattaaattaagataggctgaatcaagagggtgtatgaatatcattagcaggtgaaaaattttctcgacattaatgtcgactttaaactaattattttatatactttgtagttattccttctataacaaagagttaatcacaaactaagttttactatctaccaaccctaattgttacatatgttaatacataagatacagaaaggtccgtatacaaagtccttagaactacgttcacaataagtacaacatttggtacttaaccactgtattgtgagtaataatatgaaaatggtgtttattattatttgtggtcaagtgtactacgatagtatgtttacgcaaggattgccattaaaaatcgacagctttttctaagttatcgatgctataaagtttatgttaccaaaaaggctttaggtacttggcaacctggcagtaccaaaaaggcggttgaggcattagatttaactgattattacgtttcaaatatgaagcatgttggcatttatattctctctcccaaatcaccaagaaaaagtgccgttatccttaaaaaggatacgttgtaataaatcttatcacactgtaccatacagtctgaatcattgtttatccaagcagtttcttcaaagtataattaatttaaattagcaaatgcagacaaatggaaatccaaaaaaaaagttaactcagttgctttgccttcactatagaaacaaacgtcctaaagttgagaagaccgtttaggttgaagaaaacatttggtcggcatgtaacaaaagttcctgcaaaacacgtgaaacacatagcctgtaatgtctaattgacatctatgctggcaatttttttaaaaccatagatgaggattattatccagcagtatggtttcaaaacaagttgttttagcagccacattaccaaaaaatattatttcagtttccaaattgaatatggacaccaggctaagaaaagctgagattggtaagtccaagcgagattgaaataattgaggcaagcgtaccttgaatttgtgcacctaaaacatcaggggtaccagaagttaacatcaaatctcctgaagcatagtagacgcctctgcaccaacagtggccaacagtttaccaacatagctttctcaatttggatagtttacagcagcagatagcttaaaagtgctattttatactatgcggggtccattttataacaacagtaaaatttatttaaagaaactaaacaaaatgtaccaacagattaaatacaaaattaactaaagaacgtagaaaaagaaacaattttaaacttttgtttatactacgaattccaatgtttacgaccgtttcttcttctaattgacaacgtttcataaacgtttcaggaaacaaatttatttttaacaagataaaaaagatgattgtattataaacataggggacttgttcatgcatccgaaagtcaggcgacactaaatgttttacttgcgtgagtatggccaataaaactaaaggttgagtactggcaaccacgattacaatgttggtgggctaatccatactgatttgcttggtccaatgtataaatattatagtctctgcagacaagttgttttacttacactcctcaaagtaaaagtaatgtttacaaaaaaagttgttgagattgttgagattggtaattctgagtgagactaaataataaattataatattgtattattaagttgagcctcaaagaaccaatcaaaatttagtcgcaaatcagaaaagaaattattagttaacgttggaattcttagtataaataaaacaaagaatttcaaggtttgttaataatgggcgctgcatctagagtaatcagattacaacatgttatgagtcaaatctcgactctatttccaaaggatagttctgcaaaactaactgctactgtgaactacccaaaatgggaaactatgttggtagaatgttggccacactgttggtgcaagtgttgatgtttattttgcttcgggacatttgatgttaactcctgatactactaacgtcttaagtgcccaaattcaaggtatagtgttgatcagaagaagatattcacatatctctgttagagaactatctaacttagttgattctgctgttgatgccagaacaaatggtgcttctcctggtgaagcgttagctatttttaagaatgtttgctatcaatttaataatactccggaaattaatcaaatgatgggtttaatctacttgaagatgttcaattcaccattagctaaagcaaaagttttagactgtgctgctcctgatttaactttatcagctgttgaagcagtacttgaagattttagtccatccgtttctcaaacttttatggttaagaataacaaaaatagaggtaaaaagaacttgaaaagaaacccaaatgaagttacatgtcttagatgtcaaactcctggtcactatgctagagattgtactgctcccgttcctgcttctgcatcagcatcgggtgtctctaaacaaggtgcatcagcatttactactacctcaaatggttttgcctggatagcctccaattctagattacctatatcaagaaaatattagatattggttccaatgttcatattgctgtaaacaaagatcaatttgttgaatttgaagctattagtggtcaaatttctggtattgctgaagattcgttagaagttaaaggaattggtaaacttatattagttcatcctactactggtcatgaaattattttaaatgatgttcattatgttcctaatgctactcaaaatattttgtcaattaaaaaagcatctaaacttggtatgtttttatttactgaacatgatgttcaatttcttccatagaattctggggaacgtgttcaaatcagttctactgaaggttcattatattttttagattattttccagtagctgccaaaacatttgatgttacatctggtaatgttgaattaatgcattccaaattaggtcacccttctccagcaactctaaaactattagggtattctggtggtccatctgttaaaaaatgtgtatcatgtgcagctggcaaaatgacaaaagtttatccaaaagtatctactagtcctccagcaagtgcacctcttcaattaattcatgctgatgtttgtggttcctttccaattaaaggtaataataatgaaaagttcttcttaactatttttgatgattattcaaggtggacacatgttgttccaatccagaagaaatcaaatgttactgaattgatccaatcttttattcaaactgctgaaaacttatttgctgctaagggggatataaagctgcaatcttaagaaccgataatggtggtgaattttgtaatgatgaaatgaatgcttattgtgctaaaaagggaattactcatcaaatgaccgttccttataactcatctcaaaatggtgttgttgaaagaaaacatagaaccatccaagaaaagtttcgcactttgttgttttcatctggtttacctgaaaatttttcgtctgaagctgttaaaactgttgaatatttaattaatagatatcctgctgataatcttaagggtcgatctccatttgaaagatggtatgggtacaaaccaaattatgatattattcatccctttggtgctgcttgttatgttttagttccacctgagaaaagaacatctgcattttctcctgtttcagtatctggtattttagttggttttaactcagttcataaagcatatagatgctttattccctcactaaaagatgtcattatttccaataatgttaagtttaatgataaattgttttaatgaaagtaggtgctatacatcgtagttagtggatataaacttgttctttagaacgtacaaagaatgaaaaatgtcatgttaaatgtgtagtaaatacaatatatatagtgtagtttatattataaatgataaggaatgtaaagattaatagtcttgtaattctttatttgtcatttccaatctaatccaattactcaaacaattttgatcgtgaacatcttctggagcaaaataacctacattaaagatattacatataatacatacacactaacatattaataacaatactatacactttaattagcaattgtgataatagagagaagaagtaaagaatcattttaatattaaattttattcataattttagccgcatttaagacttctcaaatttcacattgtataataattttcatacaaaatcatacattaaataagtatttttatatttgatcacaatcattatactattaattttaatcaaatcaatcaatcttgtatattatattcactattatctttaaaaaattttggaaattgaaacttttttcaaaacaaacatcatattgaaaaaaaaaaataattatgtctaatttcaatcacaatcccaacagtcacagcaacaatctccacatcaattgcaaccaccacaagcacaacaacctcaaaatcagcaacaaccgcaaccacaatcccaatatcaaagacaactgccgcaacaacggcggcagcaatcttttcaaaatccacaattaattcaacaacaacctacacaacaacaagatcattattctgcttatggatatcaatttcaacaattacctcaaattattaatactgaaaagcatcagaattttgggaatattcaaaatataatatcacagcaaaaaaatcaattaaatcaacaaattcatcatcaacaacaacaatcacaaaatcctcagtatagccaacatcagaatactaaacagcaactaccatccaatgtatctccacaatatcaacaacattatgcaacaattacaaatcccgaaaaatctcatacatctcaaaataactatccctatcatgattcaagttatgtttcatctgatgagccgaacactacctccaaatcgactagatggaatacatctcaacttagatcatcaccatccgttacatctgtacattcatcttcaattgaattaactaatgctgattcttaagttaataaatctactgatccagttagtgatgctagaatagcagcaagtgaaatgaatacttctcatcaaacaaatgccaatacttatcaaaacgatgatgatgctatgttaaaagatatgcaagatggtgattcatttattggtgatatatctggttttccttctaccattccatctgatgacgtttcatctgttgcttcacctagatttccatctgttgctgctccatctgttgctgattcatttgttgctgctccatctgttgctacttcatctattgctgctccttctgctttaaattttgaacaaggagaaattgatttgagttacattgatgatatttattctgaaattgctgataatcttccaattgatgctgaattacaattagatttggacttgattaaccaacttaccgatgctgaacaatcttcttctccattagttagaacaatctcatctgttactggcaccaaaggaccacctccaaaaagaacttatagagatttaggtgccattttcaaagttctcaaagatgcatctatgccttctggaacaaatacaattcctacaaccttcaatcaagctatgaaatcacctgatgttgacttttggaacaaggcaattgcaaaagaattagacgtacatgctgaaaatcatacatgggatatagttgaacttaccttcacataaacgagcaattggatgtcgctgggtctttaatattaaagacaatattaatgtaccaatgtttaaagctcgtttggttgcccaaggcttcagacaagttcaaggtgttgattatggtgaaacttttagtcctctggttagatatgaaagtattagaatcttatttgctattgctgtacaattcaaattggtgtatgttgagatattaatctaaactaggattcgaacccgttactataagaatcaaaacctttagaagaagaaaccctcaacaagaatttgaaaccctcaccataagaagagaaaccctcatcaagaagttaaaaccctcaccttgaaaaataaagtttttcaaagtgaaaatcttattatataaaggaacatgtttcccacttttataattttttatttcctcttattttctttatattatttattttacttttgtttatcttatttaaataacaatacaatacaaactatattttaacttgcttattaaaatggattttgctaatagaattacccttatacaataggttatgagttcattctctcacttgtgtccaaagtcatctattaatactttgaaatctgctgaaaattatcacaattgggatgttggtgttcgctccattttagctacttttgggtccggtttattggaattttttactgacggtgatttattagtctcaccggatactccggccgatgaccctagtgttgttcaattaacattttatcttaaccgggcccttcaagttgtccttattaataccgttgatggtaacattatttccaattatcaatgtgaaggcttgtctggttctgccttattagcagcaattagaagagattattctagattgtctgctcgtcaactttattcaatggttgacaaattaactaaatcatcctctatgccacttgacaaaggattattatttttaaagaccatgagatctcaatttactcatggcatgactattgatcacctgctaggtcttttatacctacaaatgtttcgtgatccttcggtcaattcaagaattttagatgctgctgatccccaaattagtttatcagctattgaagcatctcttaaggatattgctacctcctcatcttccaatggtgctccttctgctcaagcttttattgctaacaagcctaaatctagaaacagaaaatcaaagacttcaaaagatgttatttgcagaagatgtcaacaatctggtcatatttctccaaattgtactgctgctgttcctatttccactaagccaactaacaatattaataattctgaagtttctactaatgatgttgcttggcatgtttctcaaccaattgttcatgctggtgacacttatactcttgattctggtgctaatcttcatatgactaagaattttgaacattttagtgattatgtttctgctacttctgttgaaactgtttctggtatttctggtgataatttacaaattatgggtagaggcactgtcatttttaatggtaataatggccagagaatttcaatcagtaatgttgcttatgttccaaatacttccagaaatttgatttccattaaagcaattactaggaaaactggttcaagaatttattttgatgaaggttactgttatatgcaagatggctcagttattggtaagtatttttcaaatactttgtatcaatttattttcttaccaattatctctgaaaattattgtttaattgcaaatactttaaacatgcattccagattgggtcacccatctggtagggttatgagggaattgggttatactccttcctctgatgttaaaatttgtgaacactgttctgctggtaaaatgactaaggttctaccaaaatcatctacttttaaagcaactcatcctcttcaattgattcattcagatgtttgtggtcctattaatgttcctggtttatctggtgaaagatattttttaacaattgttgatgatttttccagatggtgttcaattttacctttggcaaccaaatctgctgcttcttcagttattaaacaattcatcaacttttctgaaactcagttctcatccaaaggttttaaggttagtattattagaactgataatggtactgaattttgcaacaatgatttaaaacattatttacaagataaaggtattactcatcaacttactgttccatacaattcatctcaaaatggtgttgccgaaagaaaacatcgtactgttcaagagaaagcaagaactctcctttctgagtctggtttacaatttaatttttggtctgaagctgttaaaactgctgagtttattatcaatagatatccatctgatgttctcaatggtaaaactgcttacgaattatggatgggcagggttcctaattattcaatttttcattcttttggttgtaaatgcatggtattaattccaaaggaaaagagggaaaacattttttcaccggtctcagttgctggtatttttgttggatatagtccagcacataaagcctatagggtttttattcctaggattcaagatgttgttgtttcaaataatgtcaaatttgatgattcctattttccaatgttagactctaaaaacaatattcctattatggaggacgtttctccttctgatattttctatggtggtaatgctggtggtgttcctgttattccatctggtgcttctaattctgctgaacctcttattattaatcattcaccggttcaatccccagcaccatcttcaccagcaccttcctcctcatccacttcggatgctcattcaactacttcatcatcaccatcatctccagcttcatcatcatcatctgctccagtatctgcttcttcttcacctatgatgcaatcttctggggttgttccagataatactgaaatggttcctaactctcctagtgttcctgaaactgttgcctctgttccaatttctgatgctattgataatattatttcacaagaagataatggtgtttccaaattttttcctgatgaagacaaattagtttcatctggtgatgaagaagaaattgattctattcctaatgattttgcttatccagtttatgatgaagttcatcaagttcctattgaaccatctttacttccattacgtcgttacagaagtgataccacttcagcatctattactcaaccaccactgcaaaagccatgtttcaaaccagaaacacttgcttcatcatctacatcatcactacaccatcatctaccacttcatcaccagcacttgctccagctcaaccatctgctattgttccaatgcaaaggtccttgtctcagctctctgatattgttgattcagttcctaagcgttccaaagcattatttttaggttccaatgccattcacactgctttttctgcatctactactgtttcatctgctttaccaactacttttaatcaggctgttaattcacatcagagatccttttggttatctgctatccaaacggtattagatgctcatcaattgaatactacttggtctttggttcctcttcctgctggtcgtcgtgctattggttgtcgctgggttttcactattaaagattcaacatcaccacctacttacaaagctagattagttgctcaaggttttaggcaagtttatggtttagattattttgaaacattttccccagttgtcaggtatgaaagtattagaattgttcttgctatctcagctcaatttgacttaaagattcatcaaatggatgtttcaactgcatttttgaatggttctttgaatgaagaaatttatatgatggttcctgatggtgttgatgctccttctggtatggtttgcaagcttaataagagtctttatggtttaaaacaagctcctttttgttggaatcaagctatcaatcaagttttattgtctgctgactttcaaaggtgttcaaatgaatatggtatttatactaaggtgttttttggctctattgttattgttgctctttatgttgatgatttattaatttgttcaaataatcctgctgctatttctgatgttaaaggtcttctctcttctcattataagatgaaagatctcggtgttgcttctaggtttcttggtatgaatttacatcaatctgaaggaagtgttggtttatctttacatcactatctcaatgattatttggttgattttaatatgcaagattgcaatcctgtttctactccatttgctgctggtactgattttttgcctggtgatgctatttctgatgctgatgttacccgttttcgcagcatggtagggaagttattatttgctgctaacacttgtcgtcctgatttgtcctatgctgcttctacattatcaagattcattaaagatccaagagctaatcatattgctgctgctaaacatgtcttaaggtatattaaaggtactgtatcatttggtttggtttataagaaggtatctaattttcaattgattggttttagtgattcagattgggctggtgataagtttgatagaaaatcaattactgggtatgtatttatgatgtctggctgtgctattacttggaagtctaagaaacaacccactactgcattatcatctactgaagctgaatacatggcacttggtgatacagttaaagaactactttggttaattcaattgcttaaaactgttggtcttaaattcaattatccacctacaatttttgaagataatgaaggttgcaagttgcttacaagtcatcctgtccatcatcaaaggacaaagcatattgatatcaaacaccattttattagagagcatttaggtaacaaggttttcaatttggaatcggttagaacagatgaaatggctgctgatatgtttacaaagaatttgaatagaatgaagtgtagaaaattcaactgtaagattggtatgactcctatttcacattttggttaagtttagattatggtagggtgttgagatattaatctaaactaggattcgaacccgttactataagaatcaaaacctttagaagaagaaaccctcaacaagaatttgaaaccctcaccataagaagagaaaccctcatcaagaagttaaaaccctcaccttgaaaaatgaagtttttcaaagtgaaaatcttattatataaaggaacatgtttcccacttttataattttttatttcctcttattttctttatattatttattttacttttgtttatcttatttaaataacaatacaaactatattttaacttgcttattaaaatggattttgctaatagaattacccttatacaacagtgtacatcaaatggatgttacaacagcctttcttaatggtgatcttgaagaagaaatttatacgaagatttcaggtggtgttaatgcttcaggaaaatatggtatctcgtctttgtagtctttatggtttgaaacaggctcccctttgtttgaatatgaaaattaacaatgtaatgatgtctgcaggttttaaacggtcattatctgaatttggtttatattccaagattgtcaatgatgaagttattttagttgcactatatgttgatgatttattaattttgactaataatatggccctaattgatcaggttaaattgttgttgaattcaagttttaaaatgaaggatttgggtttggttaatacctttttgggtatgaaaattttgcatagtttgaatggtatatccctgcatcttaataaatatttaaacaatgcgttataagattttagtatgactggatgtaatgttgtttctagattacttccttcaaatgttaattctattgatgatggttctaaactttcaggatctgatgctacagtattcggcagcatggtaggaaagttgttgtttgctgctagtacagttcgaacagatttatcatatgctgcctcatacttatcaagatttatcaaagaaccatactccaagtatttaagtgcctgcaaacatacattaagatatattaaaggtacaaccaagttgggcttaatattctgtgaaggtaatgagtttgaattagtgggttattgtgatgcagattgggctggtgataaaactgataggaaatcaatgactggttatttgtttaagttaggttattcaattgttacatggaaatgtaaaaagcaacaaactattgctttatcttcaacagaagctgaatatatggccttatgtgatacagttaaggaattgctatggattaaacaattgttacatggtctaggtttaaagagtaatactatttcaaagatatatgaagataataaaggttgtaagctgttatctgagcatccagttcatcatcaaagaacaaaacatattgatattagacatcattttattagatatcacattcaaaataaagaagttgaattaagtctattagtaccaattatatgattgctgatatgttaactaaaagtttcaatagggttaaatttaatgaaattgttgagatggctggaatggtgaagatgtgattgatttggtgttgagattgttgagattggtaattctgagtgagactaaataataaattataatattgtattattaagttgagcctcgaagaaccaatcaaaatttagtcgcaaatcagaaaagaaattattagttaacgttggaattcttagtataaataaaacgaagaatttcaaggtttgttaatattacttttatgttgtttttcttatttattttatatttatttatattttatttagtttatttaaataacttttactgttgttaataatgggcgctgcatctagagtaatcagattacaacaacttcattatagtcaactattctttttttttttacattaatttcattaaaatatacaattttattcagattgattacttgtacgtattttttattcatgcttcatcaattcaacatgtcttcatatactgaactttttttttttcaagtcaacatctgtattactataaatgattgcagcactagagttttgcatttggtctctcactacactactagctcaggctcttagcagcttagctatgttgagattgttgagattggtaattctgagtgagactgaataataaattgtaatattgtattattaagttgaacctcgaagaaccaatcaaaattcagtattgctcgcaaatcagaaaagaaattattagtcaacgattggaattcttagtataagtaccacgaagaattccaaggtttgttaatattacttttatgttgttattttatatactttaacttaattttatatgttatatagtttgttcttttaataactgttgttgtcataaatatggatcctgcccaaagagtcgttagattacaacaagctacagttgatcggacggtgaacggtgctttttgctaaatatggcttacgtaatcaaatattaataaattatatatcatgaattttgttttgttgtcataaaggttgtatagtgtagtggttatcactctcggttttgatccgggcaaccccagttcgaatccgggtacgaccttaatttttttgcattattttttgcacaatcagatatattatttttgttattagtatctatttttacatttctctgttgattgaatttcaagtttaaaatattttcataaaaaataaaatatagctgcttacgtaatactaaaagtttgcacatgagctaaaaaaaggatgaatgtctaaaaagtgtcagtttgtccgagtggttaaggagaaagacttgaaatcttttgggctctgcccgcacaggttcgaatcctgtagctgacgttaattttttgcttttatttttgttatttgtttttagttttttgggggtttgtattagaatttgccttaagtttagagaaggtaacctattctatcagattattttaattgttatttatttctgtaaatttttttttacaattgaacctacaacaattatagtgcaaagatggcttttctatttaagagaaaccctaaaaccccaggtgacttagtcaaaattttgaatgaacaagtgactaaattagatcagtctaatggatctgaaaagaagaaagcccaagatgaagctacaaggcatttgataacattaaagtccattttgaatggcgatgatagtatttttggtgaatcagcaataacatcacaacctgaaattcttaatcaattgagccaagagatttattcttgtgatatattatcagtattgataactaatttagctgatatagaatttgactcaagaaaaatcgtggttttattgtttaactccttacttaaacgaaaatctggaaataggtcgccaactgttgattatttagtcaataatcccaagataataacactgttgatgcgaggtccggaattaccagaagtttcattgaattatggaattatgttacgtgaagctcttaaacatgaagtcattgccaaaattgttatatacgatccattgttttggaagtactttacatatgttaatacggatatttttgaaatatcaactgattcatttgccactctcaaggattcattgacaattcatgaaaagttagttggtgcttttttctctaatgatgccataattgatagattcatcacatcaattaatcaccttatgacagcgggaaattatgttaccaagagagaatctacaaaattgttagcagatttaataatgataaaagcaaattataaaatgatgtcaagctacgtgaacaatgttgaaaatttaaagattattatgttactcttaggagatagatcaaagaatatccaaattgaaggttttaatgtattcaaagtttttgtggcaaatccaaggaaggaaaagtcagtcattgatattttgaccaaaaatagaattagattgctagagtttttagaaactttcaataaggaaagaaacgatgatctctttattgctgaaaaagagtatattatccaacaaattcatcttcttcctaaaattgtcatgaatgaaaagtcaggcgaaattaaagaatcaaacctgaatggtaaaataattaacgaatttgactgattgaaatataagtttcactaaattatatataccccataagatcccttatactttatatacttaatatagaatattgtgtattaaaatagaatcgctaattcctatattccactaatttcaaaataagagaccatctaattctttatatctttcagagtgatcattttctgaagtactaaacattttaaagtttgaaatatcaacggtattaggttggattgcttttgcgttttcggtcggcatcaaattcgattcaacagtcacttcactttcatctactataattttatttggccaatatgtataaccaaagttgtttttatcaattagaagttgtccttcattaacaaagttattcaatatagtttccaaaatgcgaaaatttatgtcaaattcttcattttgtaattgtaaagcagataatccaggatttgatattatatagttgaaaattttagttttgacactaacatcattattacttttggagacaacataaatggatttagtgtttgaagaatcacctatatcttttccccctaattgcaatacttctattttttcacatttcatgttaagatttagcttatcaaattgagaaactgcatcataaagctcttcagctgatattaaatttatctgtcttgatttattatagagaaataataattcgtataatgttattaaaccttttttcttatctaaaatattttcatcagttaaaaaatcacatatgtctctacttaattcattaatatacactaaggaaaattttgatttagtttgttctgatttttctttttttaaactattcaaggcatttgtcattttgtttcttcgtatagacttttcaatttgtttattattcaaaagttgtccaattttcactacagaatttcttgaattttgaagtagctgattatttctatcatatgctaatgtcgttttgtttttatcagcaagtaccttttgatatttactggacatagcaattatttttttagccatagacatcaattggtctaagtcttggacagattgttccaacaatgaagaaagctcatgtgattgttctactgatttgtttgttaacccatgtatcccgttagaaagagaaacaactttgttatttccatcaacatttatgtagctttctttttccttctttaacgttttatgtaatttatcgttttggtcatttttcttaatacttttttttgctaaatatgaatgaactatatctgatattttatcgtaaagtaatctgtgccctcctttacgaaaggatagttttatgatactcaaatcaatagattcatatgattcagtagttttgagtttcaccttagctgtgtcttcacttttatcataaggatgtatcaaaaatgaattattagtcaatttagtaccacagatttcacattctagcatcgatggatgattgacgaatgtacaactaggacatattgatgcatcaaatgaaacaagatcaaaatcagtatttccattcgttttactttcctccttgataattttttcaatttgatcgtaatgtgactgaataccacaattattacatattggtagatcagtttctatactattcaatagaacagaggagctattagagtaggagcaaattggacaagcccaagatatatttttcttctgtttctttggagaattttgaacttctttagcagaatttatattaccttcagattgattggataaattcaaagttatttttggacttgatttcagaaatccattgtaaagatctatatcttgtatttccttcaattgtattgctaaatttaagtttttcttaatatcattgacaaataccaatcttttattagttaaatatattctccctttttgaagatcctctactttataactatcttgataaacaccaacatcattcaccatcaaaatatcatattcatttagttctaatattggtcttccacttggggaaagtgagatttgtctccaatagctcgattgaaattccttcatataataaagagcataaaattagggttttttcaagtttatttcaatgataaaataagtctagaagttgttctaagcgtagaatcttaatgatctagaaagtgtagtattatcatcaatttataatagagtgaattatagttgtcttaagatcataaatggttttaatgcggcggtgcatatgataactttttttgcttagatgtggcgagtgaacctattttcagttacttttattattattattattacattgaaacttaagatataaatatataatagatacaaaattatgatatagatacagatatcagatatattgaactattctactaatgagtggaaaagaataaacatttttgttaattcctttagtccttcaacattataattgccaacttcattcttcaattcttcatatactacctctctcttcaagacaccagctattaagttactgaagtgtaccttgatggttttagcttgtaaattacatacagaattttgagatcctgaagaaatgatgatactatttatcaattggaaaacaggaattaatatctcataatatgatattacttcttgtgtagtatcattgtcatttattttcagcggattgtcaagtgatattttcatagtaacaaacgctgatgatccattcaagtgttcttgaagtttcaattcaaatcctaaatctgcatctaattgtaaaaatttacattcttgaatagttttgaaaatatcatttcttattaacatttgagcaccatatctaatttgagcaattcttgttaataaactgataattgatttaaaatatgttagttcatatgtcagttcataaaatgttattccagaatttccagtatttgggtttaatgcacgacaaaagctagcatcaacaactttgaatttttgaattaatagtgaaaaataattacccttgaacaatgtttcgaataaaagattctcttgaaagtttgaaccattgaaagaatcagtaagtttgataatattttctaacaatagtaatgaagtaatacgactcgatccatcaccaaccaaagtatcatggcaaataacatcaaaagtttttgaatctaacgatttcaaaaatacaactaaatctgtaatgttccttgtattatgtgatatattttcaacaatattactaccaataatgtaaagatcagatcttaaatttgaagttgaaaatggtaatataattctttgcatagcaactttgaaaagagggaacaaacgattgtaatcaaacaaagatcttgcttcaatttcacttttattagtgtataaaatatttttatctgcactataaacagatagcaaatgaacacataaggatgataataattcagcaaatgttacatcataatccatatattcatcaagtttaggagtaatacattgaaatacttccacaataaaatcagatcgaacacttattttcatatcaagttcagcaaccaaaactctgaccaacaatgtccatgaagataaatatttgtacatattaaatttgaatgtatcatatgaagctgaacaaataataatttttttcaatttggcactttccattgcaataatacgttcattttctttaacatcaaaacttttctttgaactctttgcatataatgcaaccaatttatctataatacttaaatcataatgcgaattattagtttcagttgttacatctattgattttattcttttgaaaatatattcgtaatcaaatgacgcaaatgtgttatcaattggttcaatcatattatatgccttgaaattgagaatatctaaatagtttaaaacctttgaggatgcagaaacaaagcttgagagatgggttaatgtttccagatatgctctcttaagtgataatgtaccattaattgaagatacatgaatttcaacagcaattaattcaagtaaattatgtctgtaaaatatgaaattattaaatgtagatattgcttcaccttctgagcagaacttgttttcaactttaaaagtaccatcaaatttcatatcagaaaataaactgttaacaggtaatttttttgtattctctaataagaataaaataaggttattgttagaatttaatggagataattcagaaccatcagtacggatgtattgtaaaatctttctaccagtcatatcagatttgcacaatttcacaattatttctaaacataaactgcaaactttcacaaaagtgtaagtgaaattagaaacatcattaattgataccagagttgttttaagaatgttaacaattgacctaaataaagatttattggatgctatagttgtttcaacatctggagaaccaaagttaatttttttggtatcaaaacctaaaagaaaatgtgctattgtaggttgtttatcatcaattgaaagatttaggtttaagaagtttaagattgcaaatttaatagatagatattcctgactataatttggattttcaatttgattaataaattgtgaccttatacggatagtttcatcaattgtttcacagaggacaagtaatttgtttttcttgattaaatttgaatgaacacctatttgtaaattattgaattcttttgaagttgataattttttcaaaatggataatgatttttcagcaacttgtaattgtgttgaaccaacatataaagaaaaattagcaacaacaggtaaatttaaaataaaactttcagaaaatctgtgtaaaccagataaagcaactgtagttggatcaacgtagttattatcaggtaatcttaaaattggaattagttcatctgtaaagaaactttcaaacaataatgcattatcaataagctttaatgattcctctaaagttttcgtaacaattgaaatttctgataattctgataatctatcaattcctaaattagatatattgaatagagaatcataaactttattatcatataaaacattcaacacagcagaaccttgatgtgattgcaaatatgtgatgatattattattagcagtgacaaaatctatatttttaatacgacaagcagcagcatttaaaacaatatccggatcaagttgattcaaacaaacattcattaactttaagatggaaaatttcaataatgtcttttcattatctgaagcatcaagataatcaacttctgggaaaactttaccacaaatataattaatataacaccaaacacctggtcttctaaccattgaacctaattcttgaggaaatgaatgttttaaagattgtgatatattagttgaggaatctaatggagttaaaagtttggtaattaaatcgacaaatccaaaaattgaatgataatcagctaattttttagaaaagttttcattagtgaaatttatgaatgaattatttttattattatagaaaaaacaattatcaatagcttgccaaaatttaaatctttcttgttcagaatcacctaataacgaagttaataatgccattatagagccatttaatgaagtattagaatttaaaagatttatgagaattgtaaataattgattattatcactatcaagtaactcaacttttgcctttgtactatttttggaaacttgagaaataacttgaaagaaaccagagatataaataattgaatcttcacctaattctgttacaatttttttattagatgaattatttgaatcaactaaattacctaatactgaattttccaaaactttagaaagtgcatcattataataagataatgttgaataaattgttgaccaactgattgatgaatatttagtaagtaaagttgaattttctcttggattagttaatacatttggattacttgaatttgtcatttgtaaaaatgtgaaaacattaatcgaattactttcacctgttgctaaactagctaaaaccattgcaaaagttgacattattaagggagaattacaacgggatgcccattgtaaaaatccataaagggaagatgaagtatctgaccaaatttcagttgcatattgtggtctttcactataaagataataaattgacatatagaaacgttctaaatctgcattttcagttaattcttctaaattgaaatcctctgatgaaagtaataaatcttcttcagtatctcttaattgtgacataaaaaatgctgcatttgaaataaaagaatgaataaaagtagataaaattggaactaagaaatccacaaaatgttcattaaatgtaatttgatcatctattttataaattgtaacagcatcagtttcaattgattcagaacctaataatttttgtcgttgtaaagaacttttagctctagatgttgcctcttcatcaatatcaaataatctaataggtaaagattttggaatatgttgttgtaaaaatgatctaaaatcataaaatggtttaattgaatgatctaaagttgattcaattaatgaaatatctgcacaaattgataataattgttctaatgcaccagctgatacaaatttttgcattggatcatcaactgaaacagtaaaatcaaatttattttttctatctttactttttttacaccaatcaataaaattagttgtgaaaacaagtaatatcaatgctttaatcggacattcagctaatttatcaatattattaacactatcgattactaatttttgaagtttttcaacatcattatcattaattttatcaagatttgagacataattgaaaagtccaggaatataacataacgaaaaattatcagttggatcaaatgttgtaatatgatttaatattgatgtaaaattatccaatgtaaaatgatttgatttaaatcccgaatatatataacctaataaaatttcaccaacaatttggtattgtttgaataattgatttcttctaaatctaatatttttcataaaaggtgcatgttcatgataagtacctaaaactttacttctttcaacagattgtttaattaattctaattctttttcaatagctttgaatgattctaggatatgagttatggagaagtttttaatttgaaagattttatcttttaggtaagtttttccattattttgattagatgaatcattgaaaatagaaatttcagttgataaagaagaagtaagcttttcattttgattagattttgaaatattaattgaatttgaaaaacataaataataagaaacaatttgtaaaatataatctcttcttgaataataagctgcaattgcagaatctaaatatgaagtacctaaatttttcaattcattttgagttgcataataaaatatttcagctgcaattaattcatcaatatttaataaatcagataaattaattacattttcaataaaagtttgattaacttgaaatgatgaaccatcagataatgttacattaccagattctaatgatttcctactagtttcagatttttgtttaacaattaacagagaaatcaaatcatcagataattcctcagttaatgattgaattaattcatcattttttgatgataatgcattgtataaagcctgaaacggcagagtagaccaattatacgtcatcccctactactatcaacagttttaactatattaaattgtatttcaagaagaagtcctactataaacaaccactctctctttttacaaattttataattttcctttttgacatgaatttggaaatttcgaaatttttaatagtttgtattacatcagcaattcaatatgtgatataggtataacaactgtaacagcttctttcgaaatatacatagagatagacataaataatgactgaagataatacgtacaatataccgttgtttcaaataaccgataaatccttattggaacaatggaaatcacctgaaaaacggatattttcaagcattgatataccatcatttaaaaaatccaaggcaattgaaaatataaatggtataataacattgatttgttcaaatatatcattaaaaaatgtacctaagggggcattggatgataaattagtttatttcgaaaaaaattcatttgaaaaaccaactgaaattagtgggaggaagcaaccacctgtttttgatagtgataatgataatggggatgataaggatattaaagaagaatattctcctataactgtaagtatattaaacattctcaatgaatttcaagtgttaaaagatgatacaccaccatttgaaggtccaagaaggtatggtaatttagcctgtcgtaattggcatgataaaataactgataaaattgattatattttaaataatgaattaaaatgctatttctacaatgataatactgatgatatggacactaatgttataaaggaaaattttaaaggatttaagaaggaaatcaaatactatttattaggatcatttggttcaagagagagattggattatggtacagggcatgaattatcatttattgcatttttaggatgttttataatgattaatttaatcaatagacatgaatttaatggtaatgaatggcttataatattatctaaatattatgattttgttaaatcattaatattaacatatacattagaacctgcaggatcacatggagtttgggggttagatgatcatttccatttaatttatgtatttggtgcatgtcaattaatagattttaataaattaggaaatgatgaaaaaataattgatccaagggataattattcagtattaaattttcgaatgaatttaagtccatcatcaattttaaatactgaaacattaagggaacaaagaactaaaaatttatattataatgcaatatcatttattagaatggttaaaaagggaccatttaaggaacattcaccaatattatttgatgttgcatcaactaaaaattgggaaaaagttgttaaggggatgttaaaaatgtattatggagaagttttatcaaaattcccagttgttcaacatttttattttggtggagtattttatccatggattgattgtcaaaataattcaatattaccatctactgaaggtgaaaatttaaatgatgataatatgatgatgaaaaagagtaatagtggtagttatagtaatagatatcaaaatgaagttaattcaacaatgagtggatcatttagtaaacgagaaactgatttgaataaattaataggtaatcgttcaaacagagctgggaataatgatagatttactgaagttacaaccaaagctccatggagtaggtagtgatgattattaataatataaattaggaaaagaatgttattattatacatgcacacacgatgtatttaattctatgtaaaataaataaatataccgacattaaacttaagcggaaccagttccaaaagctttatcgaattcagtaaagacaaatctatatctaacatcaccatcccaagctctagttaaagcagtttcacaaccttcttctgaaattggaatagtttcaacccaaggaacaatattattttcagcagctaaattaaataattcaactgcttcctctcttgaacctaaagctgaagaacataaacaagaaccattaccaaagaaagtaaatggtgaaacattatatttttcatcagctgcaggtaaaccaactgaacaaaatctaccttcaacttttaaaattgataagaaagcatcaatatttaaacctgataaaccaattgcacaatttaagattaaatcgaattgatcaaaatattctttttcccaaccatcaataccagttgcaataaaaccttttgcacctaattcaaaagattgagctttctttgaatcagttcttgagaaaacataagcatcagcacctaaagctttacaaaattgaacagctaaatgacctaatccacctaaaccaacaattgcaacttttggaatttcattatttggtaaattttttggtatatatctctttaatggagagaaaactgttaaaccagcacaacataatgaagcggcatgaattgaatgtaatttttcaggaattgggaaacacatatattcatgagcacgtacatgagatgcataaccaccttgagagatataaccatcaggatatttaccatcataagttgtaacaccatttgcacaatattgttcattaccattatgacatctattacaatttaaacaagcaaaagcttgagcacctaaaccaactctatcacctaatttatgtaaagtaactttagaaccaattttaacaactttaccaataatttcatgaccaacaacttgaggtaaagtaattgaaccccaaccatgatcaccaccctttgcagtcattatatcagaaccacaaagaccacaacattcaatttcaatatcaatatcattttcaccaaaagttttaggtttataagtaatatattttggtttattccaatcttttgtatcagtaattgcaaaacctgcaaattcttctgggtaattaactttagccattattgtttatcgaaggaaggaaagaaaggaaagaaagagtataaattcaaaaaaagttattaatattctgtattcttttgggaaataaatcactttttataagaatctgtgataataagcttaataaaaaataaataagtttaaaacattttgaacttaaaagggtaataaattgcgatttctcaatgaaataataaattcacaataaaatttctttcaaattattgataaatagattagcggatagttaatactgaattgggtaatcagatccactggggaattttaattttgacagatttgaatattagaatggcattgcttatgtaattgatatgcttatgtaatatttgattatgtaatactgtattacgtaaccaaaacaagtctatgacatcatcatacgtaatactaaaattaaaactaatgaatcataatgacgtgaactataccccatctaattaccccatttttttcaaatgtacacactatatattatattaccaaccctttatcactgtttcgtaataaattgcacatttacgcattctccacatattctaattcccctccccccggtcattgtcggacatttatacaattaatccattacaccgtccacccccatcatccattatcggacatcggagaaattagagtgggcgggctgagctaacttttctcctttttctcctttttcttttttttcaattatataatcatttgtccgtcaatttagcgctattacgtaatagatgtgaaaaatggggggacgagtaagtaaattttatagtgttaacatgcataataaaagttaaaaatagaatacgtaatgcatagcaattatgacattttcattattatttttattttgttaaactttttatgcatcaaattcttcattttgtgatcatttgtgtttatttaaatgaaccctcttcccccacttttttgtaaaaatattttcttcctggtttttatctttttctctttactctttgttctgtttctttaaacatcaacaaagaaaatttataacaaagataaatttctgttatactctatactttaaatttttattataaatactcctctacaaatctttattttagaaattagaaattttatttaatttattcactgcaaaacaaacttatattatattatactatctataaacaatcatgtcttcaaacgaatcaaatagttcagtctttgatgacaataaacttgatgatgaacaaaatcaaaatcaaaatcaaaatcaatcacctttaaaaaatgaaaaatttgatcaagatgtaactaaactgagacatattaatgatgatgaatttaaattaactaaatattcaatgtcttcaaaaatttcaacttttggtttaaagggtaaagcacttagttacctgattacttcctcttgtgttattggtttctctcttttcggttatgatcaaggtttaatggcaggtattattactgctcctcaattcgttgaaactttccctgctgttggtggtgaatctcatcatgcaaccgttgttcaaggtgctgttacttcttgttatgaacttggttgtttctttggtgctttagctgcaatgtatttaggtgataaatatggtagaaaacctttaattattacaggtgcaattattatcattattggtacttttatctctattttcccatttaaaaatcattgggctttaggtcatttcgttattgctagagttattaccggtattggtaatgggtttaatactgctacaattccaatttatcaagctgaattatcagatcctaaatatagaggtagattggttaatttagaaggttcatttgtcgctgttggtactttaattgcttattggattgattttggtttatcttatgcaagtggttcagtttcttggagattaccaatttctttacaaattgtctttgctggttatgttttaattacaattattggattacctgaatctccaagataccttatttcaaaaaataaaattgatgaagctcgttatatcttatctcaagttaatgattgttcaattaatgatgaatctttaattgaagaagttattttagttaaagatgcaaataatagatttgaaaagcaaatttcaattagagaattatttaaaccttctaaacatcaatatttaaagagaatgattattggttcatcaggtcaattcttccaacaatttactggttgtaatgctgctatttattattcaactgtccttttcgaaacaactgtcggtttagatagaagattatcacttgttcttggtggtgttttcgcaactgtttacgcattattcacaattccttcattcttccttgttgatagattaggtagaagaccattattcttaattggtgcttcaggtcaaggtactgctttccttattgctttcggttgtttaactcatgataataaaaataatgctaaaggtgcagcttttggtttattcttatttattgcattctttgcctttactattttaccaatgccatgggtttatccacctgaaattaattcaatgagaactagaacaatgggtgcatcagtttcaacttgtactaattggttatcaaatttcgcagttgttatgtttacaccaattttcattaatcaatctaaatggggttgttatttattctttgcattgattaattttatttatattccagttatttatttctattatccagaaactgctggtagatcattagaagaaattgatattatctttgctaaagctcatgttgaaaataaagcagcttatagagttgctcaagaattaccaaaattatcaacaaaggaaattgaagaagaaggtattaaattaggtttatatgaagaagaagaagaatttattcatgaatcaaatagcattatgacccatcgttcaaatgctgttgctgctggtaacaataataatgaattcgatgtttaatcaatttaatgatttatgtgtcttattattcattccctcttttaatgaccccatttttatgtttttaatttatctatctaatgtgcattttatatatattctttctgtttaaattttaattaatctatactaaataaaaaaattattaatttattattacaaattattatttattatgaatcacgtcacattacattaaagttgaacgcactccaacttctttgctaccttctccatctttcatctcacctggccttttactactttcaaattgtgcataaatattcgttaatttttcaagttccttagcagaaatagatctcttggtttcctctaatgattcctttaactgagataatgtaatataaataacttttttatgattagaaacaatattttctttcacattaacttcagtattttgatcattcacctctctagaaatattactaataatagtttcaatcttctttttaacttgctccgtattactatactttctttgatcagtgattgataatttttctttaaatttaaaatcgatatctctatttttattactttcattatcattatttaaattatttgaagtttcatctaaacttttatgaacaccctttaaatatgcattatatacaactgcctgtaaatctgcacctgtataaccagaagttaattttgcaatttcaattaattcatcaccagatttctctaatttaaatccattactttgaacaacagttttcaaaatatcatacctattttcataatcaggtaaatcacaaataacacttttatccaatctaccaggtcttaataatgcagaatcaattaaatcaggtctactagttgcagctaaaacatagacaccttctaatccctctgcaccatccatttgtgtcaataattgattaacaattctatcagttacaccagttgaatcatgacctctctttggtgcaattgaatcaaattcatcaaaaaataaaatacatggttttgcactctgtgctctctcaaataattctctaatagattgttcacttgcaccaatatatttatttaaaatttcaggacctttaacagaaataaaattaagtccacattgtgatgaaattgcacttgcaagcatagttttaccacatccgggatatccataaagtaaaatacctgatcttaatcttaatgaacatttctcaaaaattggtgcatattttgttggccattctaatgtttctaataaaattcttttaacttcaattaatcctccaatatcttcccaattagttgtagatttttgaagtttaacacctcttaacgatgttggtgtataaccttcaattgcagaaacaaaatttgaatattgtaaactttccatattttcagaaatcatattatgaaatgctctgtcaattaaatttttcaaatcaactggtaaataaccatctaaatcacttgtaatatcaattaattgattgaaaagtttatcatttgagtatttgctaaaatttttcattattaaacttttcaaaatttcaacaagttgatatttatttggtgcctctaaattaatttcttcatcaacaaaatgtctttggaaaattatttgattaattgaatcctttgatttagatattactaaaatattaatttttttagatttaagttgattttcaaatgttttaattaaaagttctgttaattgatgactatctccactatcaccatgttcaacttccttagttaaaataaaatcaagattttctaatattaataatgatggtgaatgccatacactttgtttaatcagcttaacaaataaatctgagaagtatttagatttactgttgttggttagtttatcctctgaaacatcagacccagttgcattgttttcatcttcaccttcttcatcttcatctcgataaaagtatggtagatattcagaatcttgatctgtaaatttacccttcatagttccaactttactaaaatcaactattttaacataatatccattatcataaaattcctgtgctaaaaacttacaaattgctgatttaccacttcctgattttccataaagaagtgtggaaacattatcgtaaagactatttcttaacaaatctaattttttatcttgaccatgaacttcaatatctgtgtttggaaattgttgttgttgaattcttgatctcggaactaaaagatctttaccaatctttaaagatatactatttgcaagatttttctttgtttcagcatcatcgacatttgaattagtttcatcgcttaattttagcagtgtccaagtgcatagtgacctctttctataaatttcattggctttggaatctttaatatgtaattctaatattgcaccttcaggtaaaattttcggtataacaggtaatctcataccgtttgttaaaggtgtggtctcaccatacatttcaatcaatccagttctcaaaacttcaataatctgtttattcttttcatttttcaatgattttctccctaatagagaaccatttttcaattcaattttagaatcttcatttaatgttggagcattctcgtcggatgttgctaactttctaatattaattgtacaattttcaatgccaaggcgaacacttcttctactgtatggttcaacacataatagttcaccgcatgtttgatccaatcctaaactagtagctaataatggggatataaaaaaagattcttgtttaacaacggataaatcaaactcattgttatcatcttcaactgattcttcaatataacgagcaatgataacattcccaaaagttccctttggtacaccaatttggttctccttcgttgttacttttttagaataacttggggttcctggaccttctattacttgtatctgtacaaattcacagttttcaaacataggtaattttgaacctctattatagatacacattccacttccttttttaaaaactactgatcttttgataatgttcagttgtcttgagtttgattctttactattcatatttttccttttggtgaattctctgctggaacattcgtttgtttagtctctgctaaattattattatgaggttttggaataatatgtaattcagtatcatttccaacttttgcaaaatcaacttcctttgttggagtttttattttgataactttaaacgttattgcgcttgaacttgttgaatttggatgtgcatgaattattaataaatgatctttttgaacacatcttacttgtgataaaaatgtagattcaattgcctgtgcgtgaatttctgtaagttcccaatcgactgtagttaatggttcaatttcaacagatgatgcagttgattgtggattatttgcatgtgttaaatccaattcaactgtaattttagttccttccttaatatttagtaatttagcatattgggaatcaatttcaatagattttaaatcatttgttgtattaccattccaacctactgacgcaattcttttcccagttttaaaattgttgagatgcaaaacaacctgttgcactagtagattagtggaatctaagatggggtagatgaaagttgatggtaaagatattagacagctattgaaattctttactgccacactgacatctatacttaatgacatcttcaatggatggataaagtgaaattgaaataatgtatttgaagtgaaattatgaatgtagaatcaaaaattgcacactttattgataatggacttattatctttatcgtgttcattccaacttcggtaagttatacacatgaaaaattaaaaaagtgaaaaaataaaaaatagtggttaaactccttatcaggggctcgaaccctggacatttcggtcgacttcttaaagaattcttaaaagccgaacgctctaccgactgagctaacaaggaatttgtgtttaggtgtttccaaatttaatacccatcattgcttttgcacgtggactatttttatttgggcttatatcttatgattaaagatattgaggttgaaattttgctcagtcacttaaaccactataaaaaacattctaaattataaaaaatctttttttaagatataaaatgaaatgtttaggaatcaataaaaaattgaaatttggtgaattttagtaatgactaagatagtattaattttctttcaagccaatttttacaaaaactagtattattttatttatttatttagattttatataatactcttgaatttgtactttcttctttttaacacattatggttaacttcttagctatcatgtattggattttttttaggctgcaatagttttacttttgataaactcagtatttgacctatattgatgtaagaaataaaagaaatgcttgattataccaaaacaacatctattaaaatattatatacatgctatttttatgaaattaaactaggattatttataaaaaagaacaaattatctctttgcaagtatgaagttaagtgatcaagtgcaaaacatcaatttaattccagataatatatcttatattctactagaaattttttagtgctaaaaagttaaaaataaggaacatagaagcaaaactattttggcaagaaaacacagtagacagacaccaatagaaaccataattttttccattatatttatgagataatcacttaaaaacatagccaagcgccatcttttattataaatactttttaatgcaaaaatgcacttctgtgccttataggtagaactattaagagacagatagactttatggcctgttaactagcataatttcataccacaactagttattttgctagtatacctactaaatattaaatcataattttgaaaagggactcaaaattgacatcactgtctaatgaacctatataaaaacgtcttgatgccagtttcacagttaaacatttagcttacgtaagcacacaaaaaatttcaaacatattaccactagggtttttaacataacagctcttatggccaagttggtaaggcgctacactagtaatgtagcgatcctcagttcgactctgagtgagagcacttgttatactcagcgcaagtggtttagtggtaaaattcaacgttgccatcgttgagcccctggttcgattcctggcttgcgcagttttatttccgagatagtttagtggctagaatttccgcttgtcacgcgggagaccggggttcaattccccgtctcggagttctttttgatagtttaacaactacttttttaaatgtaattgctgtttgtcataattttttgctagtttatattgcagagaagaagagtgtccaaaaattttaaaaaacattcacatttctttttatcttgtaataacattttatcgcggactttctaattatctattctgaagttttcttattgatgttttacatgagatctatttttattaaatattgttgaacgataaaaaattaataataaaatttaattttggtaacaatatatttatgtttttttcttaagaaaacatcttgatatacctacaaatttcttaagcaaacgaaccaaaaaggttaaaaaaattacttaactgtgatcaaacttttcgtccaaaaatttctgtttgatcgacaactgcaggattcgaacctgcgcgggcagaacccaaaagatttcgagtcttcctccttaaccactcggacaaattgccaaacatggcttaacgccggcctgaaatttcatctcacccatttattaattacgtaatcagatatgcacaagtaataaaacttgtgaaaactaggttcagtaaaaccttttggcaatattcgttgaatataaagcaactttcacttacagtagcgtttaaataatggtttagttgcccatttagctgtttttttggtaacacatacttttcaacacctctatttaaaaaggagctttggaataagaccaatacgatgctttctcttggctcacaaggtttgtaaagaatataatttgatgtacttaatagtcataagttttttagataggattaagcaataccattatcgtatacaaattttggtttttttactatcaaatttgacctagctttgagtaactttttaaaagccgtttatcctttttatatatgacccaaccaatgttgataaaaagcccgttattcaattttaataacaagaaacgatggaaactataatatgaatcaataattgaaaccaggattgtgaatactgaactaaacatttagtttatagcatgttgtaaaatattatttgatgcacacaaaatacaatttagattgcgttaaatacccaatttctaaaaagtattaaatgaacccatatcctttgtttaagattctgcttttgtagttttttagcaagttgattacagtaatatagatatatgaaaagcaaatcattctcataatattcgattcaaccaaaataacctcagactttttcacctttgaatgtaaattgtaagttatgggctctttgtttaaaattaatatttacgagaaaaacactactaagggagccaactataaagtttaaagtatataaaataacaacattaaagaaatattaaaaaggtaaagcctggaattctaatgtttaatcaacaatacctaggtttaataagttctttaatgttgcaatctaataactatagatgcaagatccttttttgctatcaaaaagtgtcaaaaaaaccaaactgtataagctaaagaataactaaaagtatacacaataccaacagagacgttattaaacgttggaattctttgttctaattatactaggaattccaacgttaaatatcgtatcattcaggtccgcctgtaattaccaatctcaacatttggagtattattacttattatttagtctcacatagagatgcactattctatgtctacatttgataacaacaacaattattagatgaactaaatgagaaagaaccaaaaaaattatcaattttcctatttaatcagttattttaaatgttgtacttctactattttatcataaaatacggattctgtaaaaataattgttagattctgaaaccgaatacccctaataattgatatgttaaattaattatacgtttacaaaaaataaaacaaaagctagacaacaaatttatatatattcttaaaatatagtctggctatttttctgataataaaaaagttaacccaaaataagtcttaaaagtgtttaaaaataaaatgataaggtttaaaaacggttaaaaccacaaataagtaaaaaccattagctatttatgcttcaaacagctgttatttttacttttgcccaaagtcacgtgtaaacataaacactgagcttaccagtgagtttgttgcacaacaagtgctcttatggccaagttggtaaggcgctacactagtaatgtagcgatcctcagttcgactctgagtgagagcattattttttatcattcatttattggtttttttttgttttaatttataaaacaattttactactatacttatctacagttccttttaatcaatgaacttaatttaatgaaaacttaaaaaaattctaattaatctattattctatctaaattataaaacgattagtaaaagagaaattgtgtaacattgagagataatatacaaaataacctaaattgatttacatcacaattaatcaacttcttcaacagttggaccagctggttcttctgctgctggacctgcacctgggaaaccacctggagctgcacctggagcaccacctggggcaccacctgcttggtagaatttagtcataattgggttaacaacttgttcaagttccttttgtttatcatcaaattcttcctttgtagcagttaagttagcatctaaccaagcaatagtttcatcacatgctttagttaattcttctctttcagctgcgtcaaccttttcttcgaaagctttttcagatgaggtattcttaacagagtaagcataagattctaattgattctttgatgcaattcttgaagcttcagcttcatcttgttccttgaatttttctgcttcagcaaccattctttcgatatcttcttgagataatctacccttatcgttagtaatagtaatcttttgagtcttaccagtacccttttctaatgcagaaacatttaagataccattagcatcaatatcaaaggtaacttcaatttgtgggacacctcttggagctggtggaataccagttaattcgaatttacctaaaatgttgttatcctttgttcttgctctttcaccttcaaagacttgaattaagacacctggttggttatcagcataagttgagaaagtctcagatttcttacatggaatagtagagtttcttggaattaatttagtcataacaccaccagcggtttcaatacctaaagataatggagtaacatctaataataataaatcttgagtctttgatgattgatcaccagttaagatagcagcttgaacagcagcaccataagcaacagcttcatcagggttaattgacttatttggttctttaccattgaagtaatcagaaactaatttttgaacctttggaattctagttgaaccaccaacaaggacaatttcatcaactgaggatttatcaattttagaatcctttaagactttttcaacaggatctaaggtagatctgaataaatcttgacataattcttcgaatctagctctagtaattgaagtgtagtaatcaataccttcgaataaggaatcaatttcaattgaagtttgagcagatgatgataaagttctctttgctctttcacaagcagttcttaatcttctcattgctcttgggttagtagttaaatctttcttgttctttctcttgaaatcagttgcgaaatggttaactaatctgttatcgaaatcttcaccacctaaatgggtatcaccagcagttgccttaacttcgaaaataccttcttcaatagataataaggaaacatcgaaagtaccaccacctaaatcgaaaattaaaacattcttttcaccttcagctttcttatctaaaccataagcgattgcagcagcagttggttcgttaataattcttaaaacgtttaaaccagcaattgcaccagcatccttagttgcttgtctttgagaatcattgaaataagctggaacggtaacgacagcatcgttaactttacaaccgagataagcttcagcaacttctttcattttagataaaatcattgatgaaatttcttctggagtgaaaactttagtttcacccttgtaatcaacttgaatttttggtttacctgcttcatcaataatcttgaatgggaaatgtttcatatcagtttgaacttctgcatcagtgaattttctaccaattaatctctttgcatcgaaaacagtgttatgtgggttcattgcagcttgattctttgcagcatcaccaattaatctttcagtatcagtgaaagcaacatatgatggggtagttctgttaccttgatcgtttgcaataatatcaactctatcatttgagaaatgagcgacacatgaataagtagtacctaaatcaataccaacagctttagacataattaatatatttgatttgttttgttaattgaaaggaaggaaaagaaaaagaaggggagaggaaaacaaaaatcgaaacatccctcctccaacgtccaacgtgcaattgaaaagttgggaattgagttgtaatttatagaaattgaaatttcaattgaaatttgatgaactgtccatttgaatttccaacaactgagaagaaccttctcgaagattctaaaaaagttggttgagccccattttcaatcttgtgattacgtaatataaatttaccagtctatgcgtcgatgggtctgtgctttttggtttattttcattgaagattgattgaactattcggatcgataatggacttaagggtggtggcgaataattcaccaaggtttaatatctatttcttttcatttgtttcatttaatattcaattccattcaatctagaattattataggtcctcttcaatacttaaattatttgcttaatttttaatatagcttcaattccctatatttcataaaaaaatttcaaattacaccaaaaaaaagtattatagccattgaacaattaccatctcaattagcaattattataacttttgataaattacacttaacacacacacttacacataaataaataaatcaaatataatataatataatataaaatgtcaactcctgctcgtcgtaggttaatgcgtgattttaaacgtattcaacaagattcagcttccgcatcaggtggtatatcagcatctccattaactgataatgttatgatttggaatgcaattattattggtcctgaagaaactccatttgaggatggtacttttagactttgtttaacatttgatgaacaatatccaaataaacctccacatgttaaatttacaagtgaaattttccatccaaatgtttatgcaagtggtgatttatgtttagatattttacaaaatagatggagtccaacttatgatgttgctagtattttaacaagtattcaaagtttattaaatgatccaaatattaactcacccgcaaatgttgaagctgcaagtctatataaagatcatagaagtcaatatattaaaagagttaaacaaacagttgaaaaaagttggactgaagatttaaaagatattgaggatgatgatgatgatgatgatgatgacgacgaagatgatgacgaggacgatgaagatgatgacgacgaagattaagaatgagttactttatgtgatctcaatttcacaagggtccaattacgaatgatcataatatatcggggttacacaagtaagtaaccatgaagctcaatgtagttgttcaattctgaatattttttaatcttattcatcaacttattcactcatttaatccaatctaattcaaatttttatctgtacaaattgtcttttagggaataatgtttctgattgtgaactatatacagctaaactaccgcttttataaacaataaatactaaatataccaattatatgcatcataatagtttgtttaaactagtataaccaaagataataccattttttatttaattttctttccatttccaatttttccttttcttcttgtatcctctttaattcttcaagtttatcattttcctcttgctctattcttttcctttcattttcttctctttcctcacgatctgctacatcccatggatattctggaacattacctgtaacattcactcttctatcttgtttaaaacataataccgttaaaaaactaatgcaactaaaacaattctattaacaggattcattcttctatcttgtctatattgttgtaatcttttcaatccaaaactacgtggatctaatgatggtaatttttttataattgtatcttttgttggattaaaagttttcaatattgaaggtaatttaaatggtaaatctggtggtgtatcaggtcttttattaatttgtaatgcatcaatttctccacttgacatttgtaatgctgatcttgatgattcagatgattcactactaatatcttttgatatattattaataatactatccaattcagtttttttaatagattttttactaatctcatttatactagtatcatctatagtatctttattatcttatattccattttcaatttcaactccataaggtgtataataatcatgtaattcatagaatccctctcttggaccatgactaccataagcccaccataaagaaaatcttttaatatcttgatctaaacctttccaatttttctttaatttttcattcatttcatctataacatgttgctttttgaaaaatggtaatttctcaaatgcttttggacttgcaaaataaactttacaatcaaaatctgttaaatcaaaatcatcatcactacctgcatttggattaaaaattgaaaaaatatctttaactgatgcaagtgcaagtttattacgttcatttttaacattttgctcttgctttaatcttgaattaagtaatttagctgatggttttgcatatttaattgcctttttcacaggtttggatacattagacattctataaataaatattcgacttgattttattctaataaactatacaaaagtagtaaataaaatctgcaaatatatgaatatcaacatgaatttttcaataatttaaatttagtgaaactatgcacattaaagaaaaaataattatttacattttcgcagtggacaatgttttactattttgacccaacttagtgatgatcaattctttattacctctgttgcactttcagaaccaatactataaacatggctgacgagaaagaaattcaacaagtggaatcaaaaactgaagaagttgcaccaactccagatataaccgcaacatttttaagttcagtaactggtcaaaatgttaatgttaaacttttcaatgattttaaatatactggtgaattatcatcaattgatggatatatgaatgttgtattacaaaatgcaagtgaaattgttaatgggaaagttacaaatacttatgaggaagttttcttacgtggtaataacgtaatttacattggtaaaatgtaaatatgtcttaaatataggatgaaataaatgataatcaaggttctagtattttggcatcttgttttagtgttatagatattgaatggtatgtaagacttgtatattataaaaataaagaaataaagaagtgaaaagaagtgagtcttaagataaatcatgtcttagatgtgctatctcattaaaatcatttttgtaaagtgtgtttgatatatgaatatactgtactccattacagagtatcctttaaagaacacgtacagtatcatcacattcgttatctctttaaagtgttaacagataacaacatgaataatctccagaacttcctaattaggtaactaaagttgcccgttttaggaagagtttttaatctttaaattatatttatgaagttgtaagaaataactgagatagagaagaagactagagagcaaaagaagactttagaatataatttacttatttaatataacattgctttgataacaaatacaagatgtattttattccaatttgtgataatgaggtatcaccaccaaatattgaaagagaggattcaactgcaaagagtttaatcaacaccattttttttaacaatgctaagaataatagcaatggtgaatattttggaattaatcacgatgatttaatcaatcgtgcaaagaatattttattagttcaaatatttatggtttatcaatggtccgttattagagctaggattgaacatccttataaattgaaaaatttacattttgcatgtaaagaagttacaccatggaattttgttgttgaagatttagatgttaaaatgtatttggagaatccaagatttttatggagattttcagttaataattataaatatttttatggaattttcacaaaaggtatgaaaacttttaataattgtaagatatctgatgaattatatgttgatgaattattaacttatgaatttagataaatctgaagttagtgccatattatataactttttgtggatcattagaaaattatattagacatttattcggtaaatcaacaagggaaacttctaaatggtttaaaatgtatgattttaataaactattagaaaattcatcctcttatgaattaaaagattatgaaaaggaagaaattaaatattcatatgattatattttacaaatgattgaacctaatatgaattatgatgattttgtaaggataattgtaacaggacatacattaactgatgcaggaccattattaaaatcagttattgaatatgaaaaaatgttgaaaaaacaaagaaaggatagattaaaggaagctaaaatggaaaaagccagcacaagtgtagttgagatcaatgataacagttgtcatcgataataaagaaattgataattctatagtggaagcaaatcaaatcgttgatctctcacaagtgtagaataatgatttccatcatttaatcgaaaactatagatacctatattatataaatgtatttatagaataactaaacaacccgacaataactcaatgaatgaatcagtttgtttgattcagagttttatatttgataatatgtttacccttaatccaagcatctctcacaccaattggaactcttggatctgaagttacaccatcaatcagagtaataactttattaatagtagatttcatcagaagattttgttgttgaacaattgaaatgaaggaaacccaaacaataacagttaagatatttaagaaatttttaccatcaccataacctattaaatttaatgggaaattaaacaatgtccaaataattgaaatgagcagagaagctaattgaaattgaactgcccatccataaccaatttgactatatttagtactaatgaattctaaaacatttttaatttgaatttgaacattagcattgatgtttaatttaggaacaacaaatgtacgtgtatagtttaagacatggaaaagtgagaaaatgacaaatggaaatagagttaatgcagatcttggtaagataaacaaataagataatgataagaaaatgtaaggggttgttgaatgagattttgcaggtttaattagtggttttaaggaagtaataaattcaatgacttgttctttagtatctttaacaacaggttttgaagttgttgaagcagattctttagaagtagaagtagatgaggataatggtgaatctgactttttagttgtagcagttaaagattgatataatgagataattaaggaagttgagatgaaaaagtaggataatgtgtaaggctctagtagaatgaggtggtaaaagtgaggaaggaaaagaatagagtagccaattgagtaccataccaaacattggataaggtaattaattttttcatgttttcaatgtcagtcatttaagttcctgttgtgtaaataaagaagagaagacattaaaacaataaagacaagtatcctctcccagtgaatttatcaacttagacacccagagaaaaattaaagtttcccaatacggtaaccgttaaaaatatttttcttaaattattttaattttgatgttcctatataatttagctgaaaagtttttcatttctttgtgtctttcagttatcttctaataaacaatagtagaataagacacaaatatgagacaaaagagagctaaacaagtatcgtaaacaaatgcaagttttacgtacaacttttaaatttaaaactccaattcaatgtttagttgatgattcaacagtacttgaatctgcaaagacgagttatgaccttatcaaaggaatcaatagtgttgttcaaatggagtgtaagtttttaatcacacaatgttgtattcaacatttatatgatagtaataatcaacttgcagttgatcttgctaaaagaatggaaaagagaagatgtggtcataaggaaacactttcatcatttgaatgtatgaaaagtataactaatgttgaaggtgaaaataaatatagatatttagttgtaactcaagatgaaaatttaagaacaagtttaagaaatattgcaggtgttccattagttttcttacatcgtagtgttttagttatggaaccattaagtaaagtaactaaaagagttgttagtgcagttgaaagaatgaaacttacacaagggttgaatagtattgatgcaggtaaaaggatcacgagattcagataatgaagatggagaagatggtgaaggcgatgatcaaaataatggaaatagacctgttaaaaagggtaaaaaagttaaaggtgttaatccattagctatgaagaaaaagcaaaagaaggtagtacctgctaaatcaactgataaacaagatacagaaagtaatgatgatggtaagaagaagagaagaagaaggaaacatggtaaaaattctactgcaaataatgaaaatgatgaacaatcagaggaaaaaaggcgaaatagtggcaaatgaacaaagggaagacaaaccaagtgaaccagaacctgttgcaacagaaacaaatcctacagaagtataatttagatgtataataaaagtatagattaaactgttttataatactgtaatagaaaataactccctttccgaaataggaaggcgtgaagaagtttggagtagttttcaatcttatagctatatacacacgttttgaacaccgttctttcaagtgattgttagcataaacaccatcagattagaagtgaagaatggattttgaatcaactatcaagtgttcgtaaagtttttttggagagtaatttacttctgactgaacgacatttaatcaattccgcaaaatggtcaagtgaagccttaaatggaatgatccaattaactagagaacaacaatacgctgaatttcaaatgatgaaacgttccaataattttaaatcatccaatgcacctaactctttatcttcaccattattatcatctgcatcatttgaaccttccgcaactgcaagttatgcaataggtagtacaggatttgaaagtactagtacaaacgccaacagtagtacacataatttcacagcaacaaataaaatacttggatctacaactacaggtcaaggatcaacaaatagtcttaatttcttaccatctgcatttactggtggtagtttaactggtgaattagaagctcaacaggattacaataatttaaagtggtgttaaaaatgaaaatgaagaatttaatcaatttatagaaagagatgtcatttcattagctgactcctattttaattgcaaagaatacaatagatgttcagatgttttgaaaaattgtaaaagttatagagctttattcctacgactatattcactatttctaagtggtgaaaaaaagagaactcttgagaatggaacggtattgggtcaaaatgatcgtaattctcaaaatccaaacctgactactataataaaggaacttgaagaatataaaacttcaaataatatatccagtgtgaatgatccatttttactttatctacaaggtattattttcttaaaatctaaaaaaatgtcacatgctcaagaaatgttttatcaatcattatcattgtaccctattaattggagttgttggaaggaattaattgccagtttatctacatttagtgaagcattgagaatgataaatagaatacgtaaaaatacaaaatttacagatcgaaaagaatattatttgatgtttctgttttttaaaattacagtttatcaagaattttatcaaatatctaatgaagttttatccaatttaaatgatctatgtgaaattttccccaatttcagtttcttgaaaactcaaaaagctttaatatcgtataatgaattagactatgcaacaggcagagaatatatttgatgatatattgaaatcagatccaatgagattggatgaaatggatatttattcaaatattctttatgttatggaaaatagatctaaactttcatatctagctcattacgcccacgaagttgatccattacgcccagagacttgttgtataattgcaaattatcattcaataaagtttgatcatcaaaaggcaattatgtattataaaagagcattatcattgaagtcaagattgtcttagtgcttggactttaatgggtcatgaatttgttgaattgaaaaattcaaatgctgcaatagaaagttatagaagagcagtcgatacaaataacaaagattttagagcatggtatggtttaggacaagcctatgaagtgttagatatgcatttatattcattatattattatcaaagagcatgttcattaaaacctatggataagagaatgtggcaagctatagggaactgttgtgagaaattagaagattatgaagattcaattaaatcatataagaaagcattatcagtttcaatcgattcagaccctgcgatattatgtaaattggggcatctttattctcatattgatgatgctaaaaatgctaagctttacatgaagatatgtttagatcaggagcttaatggagaaattacagatgaaacaacaaaggcaagattatggttagctcaacatgagatgttaaattctaactggcaattggcttataattatgcagttgatttaactcagggaacatcccaagaaatcgaggaagctcgtgccattgctagagaagctcgaatgaaacttaacacatctaccagttctaaaaaggcatttttatagtataactatgatttgtaaaactatacgattatttatacataagacaagataactaactaattcgataaatagataaaaccacagagaaagaagtcgaaagtagaaactccagaactgcgaaaatagatttacgtaaaatttatttttgctttctacatgattatttttgtcttaggtagttctttctaatatatacgtctataacatacatttatagtagtaataatttatactagtaataaacaacagcctattattaggtttcgaaacaaaggaaaaaaacatgcctcctaaacctaaccggccaccaaaaagaccggcaatgccaccaccacctcctccttctaatggtgcagcatctaataattcaagcaaaacatcaactaaacctggtgaaccattgaaaaagaaagctaaaatacttctaccaccgcctccgccaccaagaatcatcacaaaaacctccaccaaagccaaatggtgcaacaacgacatcaaaaatatcctcaaataaacctatttctcacacagctccaccccctccacgtccagcaccacctaaaatacaagtggcaagtacttctaaacctcaagacaataatatagatatagaaacattaagaggaaagaactgaaaaatggaaaaaacttcaaaaacaacgatttacagagaaaaaagttcaaaaaggtacttatgttcataatgttaaatttgagatgccacctgaacatataagaaaaattatgacttcacaaggtgatttatcatcaagatcatttaataatgaaaaacgtgcaatgttgggtgctcttaaatatttacctcatgcattactgaaattacttgaaaacatacctcaaccatgggaatctgagaaaactgttaaagttttatatcatacaggtggtgcaatatcatttgttaatgaaattccaagagttattgaacctgtttataaagctcaatggtcaactgcatggattcaaatgagaaaagagaaacgtgatcgtaaaaattttagaagaatcaaattcccaccatttgatgatgaagaaccatttatgaatttttctgatcaaataccttcaattgattcaatacaaccaatacgaatggatttagatccagtagaagatgaagcagtagtttgattggttatatgatgaaaaacctcttaattgatgatttagattttgtcaatggtgaatcttatagaaaatataacttgaatattaatacaatggcaaatttacaaagattagcaacaccattgatacacgatgaacaattggatccaaattatttttacttatttgataaggaatctttgtttactgcgaaggcactaaatattgctttaccaggaggtccaaaatttgaaccattatacaaaactgaaaatccagaagaagaagactttaatgagttcaattccttagatagaatcatttttagaagtccaataaaatcagaatataaagttgcatttccctatcttattcaattcattagtcagatcaatttctcttccaatataccaccatccaactgtattatttactaaaactgacgatccagaaattcctgtattccattttaattcagattataatcaaatacgtcccaaaataggaactaccaatatctacgaatttgaagattttgatcaagaaacaggtgaattaattaatgattttggaatagttgatgatatttcattcgatttaccagaagattttgctccatttttagaggatgaagacttagagcctaataaaaatacatatagctctttggaactttattggtccgctaaccctttcaattctagtacaggtgaaatgaaaagagcccaagatgtttctttagttaaaaaatggtattcaaatcgtccttcctctgatgagcgtgttaaagttaagatttctcatcaaaaacttttgaaacatgatgttcttaatgaattaaaaaaagaaaaactttcatcaaatgaatcaactcctaaactattaaaagcattgaaaaacacaaaatttttccaagaaacttcattggactggattgaagctggtattcaagtttgtaagcaaggccataatatgcttaatttattaatccataaaagaggtttaacttatttacatctagattataattttaatttgaaaccaacaaaaacattgtctacaaaggaacgtaagaaatctagatttggtaatgcattccatcttattagagaaattttaagaatgatcaagatgatcgtagatgcacatattcagtttagattaggaaatattgatgcatatcagttagcagatggtttatactatgcaatgaatcatatgggtcaactcactggtatatatagatacaagtataaagttatgcatcagatcagagcaatcaaagatttaaaacatgttgtttatagcagattcaataaaattattggaaagggtcctggatgtggattttggcaacctgcatggagagtttggatttttttcatgagaggtattattcctattttagagagatggttaggaaatcttttaacacgtcaatttgaaggcagacagtccaaagaagttactaagacaattactaaacaaagggtagattcatattactgatttagaagttaagagcagctgttatgaaagatattcttgatatgataccggagggtatgaaagcaaaataaatctaagacaattttacaacatttgagtgaagcatggagatgttggaaggctaatattccttggaatgttccaggattacctttaccaatagtcaatattattgaaagatatatcaaggccaaggcagatggctggatttctgttgctcattacaatagagaaagaattcaaaagggtaaatcgattgaaaaaactgttgtaaagaagaatttaggtagattaacacgtttatggatcaaaaatgaacaagactagacaattagaataccaaaaagaaggttcctttgtatctcctgaagaaggtgtggaaatttatatgaatatggttaactggcttgaaagtagaaattttgtcccctattccatttcctcccattaattataaacatgatagtaaaattttaatcttagcattggaaaatttaaaagaagtttatcaaggtaatagtagattaaattctcaagaaagacaggaattatctattattgaacaagcatatgacaatccacatgaattcttggcaaatattaaaagaactattttaactcaaagaaactttaaggaagtgaaagttgaaatggccgataactttagtagtattactcctgtttatgatattgaaccacttgaaaaaattgttgatgcttatctcgatcaatatttatggtatgaagctgagaaaagaggattgtttcctaattgggtcaaaccgaatgatgcagaaatcccatcctttacttacttataaatggtgtcaaggtattaataatttaaatgatgtttggaatgtttctgagggtcaatcaaatgttgttcttcaaactacacttgataaattaggtgaaaagatagatttcacgttactcaatcagttgttaagactagttgttgatccaaatattgctgattatataacatctaagaataatgttagtatcaactataaagatatgagtcacatcaatcaatttggtattattaaaggtttacaatttgcatcttttatataccaatattatgcattagctacagatttaatgattttaggaattgatagagcaactgacattgcaggcccaccagataatcctaacgagtttttggaatttgaaagtttggagaaacaagattctcatccaatcaaattgtatatgagatatattgataaaattaccatttttttcagatttaacaaagaagattcagatgagttgattgaagattacttatctgaaaatccagatcctaattttgaacaaattgttggttataataatagaagatgttggccaagagattcaagaatgaagttaacgaggcacgatgttcacttaggtcgtgctacattttgggaagtttctggtcgtttaccaaggtcaattattgatttgaaatgggaaaatactttagcgtcagtttattccaaggataatcctaatttgttgttcacaatgtgtggttttgaaattagaattttaccaaatataagagcaaaggaaagtaaaccatcaaaagaaggtgtttgggatcttattgaggaaaacactaagagaaattactgcaaaagcgtatttacaagttactcaagaagacattgagaagttccaaaatactattagaagaatcttattatctgctggctcaagtccttttactaaaattgcaagcaaatggaacactgctatcttatcattatttgtttattaccgtgaagcgattgttgcaactgagccacttttagatattattgtcaagtctgaaactaagattcaaaataaagtcaagttaggtttgaactctaaaatgccaactcgttttcctcctgctgttttttacacacctaaagagcttggaggtttaggaatgcttagtgcatctcatattcttattccatcatccgatcttagatggtctcgtcaaactgaaactggtataacacactttccgttctggtatgactcatgatgatgaaagattgattcctacaatttatagatatattaccacatgggaaaatgaatttttagattctcaaagagtttggtcaggaattttcaagtaaaagaagtgaagctgaacaaatgaagaaaagattaacattcgaagatttggaagattgttgggacagaggtttaccaagagtcagtaccttgtttcaaaaagataggcaaactcttgcagttgataaaggatatcgtattcgtaaagaatttaaagaatattcaatcattagaaacaatccattttggtggttatcagatagacatgatggtagattgtggaatcttagcgcatatcgtacagatgttattcaagctcttggtggtattgaaactattctagagcacacacttttcaaaggtactggttttgaatcatgggaaggtttgttttgggaaaaggcgtctggttttgaagataccttgaagtttaaaaaattgacaaatgcccaacgttccggtttatcacaaattccaaatagaagatttacattatggtggtctcctacaatcaatagagctaatgtttatgttggttttttggttcaattagatctaacaggtatatttttacatggtaaaattcctactttgaaaatttcatttattcaaattttcagagcccacttatggcaaaaaattcatgaaagtatggttgttgatttatgccaggtttttgatagtcatctagaagaattattaattgacagtgtccaaaaattaccaattcatcctcgtaaatcttataaaatgaattcatctactgctgatattttattaactggtgttactcaatggaattgctctaaaccatcattactttttgattccgataatcaaagcactacaattaagagtgatcaattttggattgatgttcaagttagatatggtgattatgattctcatgatatttcacgttatgcaagagctaaatttttagactataccactgatacaagtagtgtttatccttcttccactggtcttttaattgcagttgatttggcatacaatatgtatgatgcttatggtaattggttccctggattgaaagaattagttcaaaaggcaatgaaaactattatgaaggcaaatccagcaatgtacgttttaagagaaagaatcagaaaaggtttacaattataccaagcgcaaccacaagaaacatttttaagttctagtaattatgccgaacttttcaataatgaaaataaattaattgttgatgataccaatgtttatcgtgttgtaacccatagaacaagtgaaggtaattctgcaattaaagttttgaatggtgcattgtttatgatcaatccaagaactggtcaattatttttgaaagttatgcatagttctatcttccaaggtcaaaaacatagaagtaaaatatctaaatggaagtccgctgaagaagttgctgcattggttagatcattacctagtgaagaacaacctaaacaagttattattacaactaaaggtattttagatccattagaagttcatatgcttgatttccctaatatatcattaagaccaacggaacttaatatgccgtttgatgctgcattaaagattgaaaaattaagtaatttagtcagtacagcaaaagaaccacaaatggttttattcaatatctatgatgattggattgaaagttgttcatcatttactgcattcaatagattgatagttttgatgagagctttacaagttaatgatgttaagaccaggatgattttgaaaccaaatagttcaatagtaacaaaagaacatcacttatggccaagtttaacaatggaacaatggagagatgttgagtcacaattagcagacttgattttaagtgattattctgagaaaaatagtgttaatattgactctttaactgataatgagattagagatatcatattgggacaaaaacttaatgctccatcaggttcaaaatcaaaagattatggaaattgaaggtaacaaggtggttaatcttaataacgatgagaataagatggatgaggatgaggaagaaggacaaaaaatttcaaccaaaactaagacagttaatgttcatggtgaagaaattataacagttaccacaaattcagcaggtcaagagaaatttgaaggtaaatcaagttggagaaaaagagcaatcttggttagtatgttggaattacaaaagagtaaagtttttgttacatctggtaactttgcagatgaggaaagtcatgcctttgttttacctaagaacattctgtcaacatttttatcatgttgtgatactagggtgcaagttgggggttacatttatggtaaatctccagcagataataatcaagttaaagaaattagatgtattgttattgtgcctcaacttggtgaacataatcaagttaatttcccggattctccagccaatagcaaatatttggaaggtttagaaccattaggatggattcatacaattccttcaggtaaagaaacggactattgatggatgttatgaaatcatcaatcatgcaagaatgaagaatgattacgaatggactaatcaagcatcagttatatctgttgcaattgcaagtggtaatgttactataactagtaatcgtgttacaaataatggtcttagatggggtgttaaatatgctaaatatttggatcaagctgatagattaattcattattctgatgattatagagttagtacaccattgatattgacagaaaagtttaagggatttactatagttcctgaagctgatatttggaattacactttcatgccaaattcatggaataaagatcttgattacagcttaaagattgatcagccattaccatttttccatgaattacatcgtccaattcattttgatgcatttaataatttagaaaagagtagaattggtgaggatgaagatgatggtcgtatggaagtagaagcagaccaggaagatgttcttatgtaaaatatgtaaaatatgttataattatttaacaatagccaaacttatttttgattcttaatatccatcaaaggattaaactttatctctcatcaaactaaaaaattcaagctacacaatttatttacactatattaaagtttatttcatatcttttaactcgtattcttcattatttttggtattagaaggactgatattaggtgcagttttgcttcttgctgcatcctcctcaaccagtaattctctcaattttccctttaccacagtttttgtttgtgaaaacatagcattaccaacggatatcatcggtcctaacatttgaacattatatgcaacatataaaccagttatggtgaatattgcaagaataaataaaattgggttacgaacaacaatcatcaattcgttccaacctaaaactaataataaaacatacatgaaagttggaatactagttcggtttgcaaccattgaacgtttagcatccaaatatatagcatcagattcctttttaaatctttgatttattttggcttcctgttttgtagttaataatgaggcaaatctatttttcttcttcccttcataggattgttcattatctgagatatctgttgattcataacccccgtaataatcagcatcatcatcatcatcatcatcttcatcactaacggaatcattaatagaatatacaggtttttgaattaatttaccatttgataacttcattgcactaaatattggaagtgtctttttagctgtttctaccgcattattaaattgtgaatctatttgattaaaatccttccagattaacggtaacccctttccatcgtatttgaatttatcttcaaatacagttcttaaaactcttgagactgtttcttcgttaacatagttatgaacaatgttatcaaacttattccagaaacttttcataagtcttaaatgtaatgattcattcaagttttcactaagtccaattttaaagtcataacttgcatttaataaatatggtttcaacagttttgatgttaatgattcaaatttcgagtaaatattatcccatgataaattagttggctgagataattcttcgacaacgtattctttaaagttgttttggaactttctagataatttatttatcaatgatttagattctttttgtttcaggatgtttgagaactcttcaagacgtttcttcaagtctgcaagttgaatttcgtattcatcctgataaatatttgcagttgtatcttggtcagtaaattgaaattccaaagcttttgattgaaaatcagcaatgactccgtcagtggttgatgttaaaatatccagaaatgccatacctttacttttcttctttaaatcaggaaatttggtctcttgagcagatattaagctatcagctaagtttttcaaaatttttgaatagaaatcctttaatttgatatcaattttttcagctaaatttgaacgtatatcagtataaactgcattttgataacgtgaagcttgtgaatcataagcagagagacatttgtttcttaaagagttaaagatgacacagctaccagttggattttctaatgaatttccaacttcagtaaactctttagtaaatactgcatcataaacattattcagtatctcattacacttgaatttagaaactaaaatttgctgagttggtaaatctaaatctttattatcttcaatttgactccatattttttctgaatataatgcccatgcatcaattggtatctttctatgatatttattattatcaaagaatgtatcattagagaattgatcacctaattgcattatattatgttcaaactcgtcaggtttatagtatttatgtgtaattgagaagaatttaagatcaaagaaatcatcaattttagaatcaatacattcatcaggtttatttaaatctgtccaaattttattcatatcagcttcaagtgattgacccaagtttgataatggagtcatacctgtaaaatctctaataacaaacaataaaagacatttttgtttactttgatggaataatgaaagattaacttccataacagttttcaataattccatatttgcaccttgatataaaccaacttgatgttcaaaaatgttaacaattaaaacttcggaagtagctaatgcaaataatgctgatttacgttcaaaatctttatcatcagcacgttctctaccatcgacaccttcaacatctaaaacataaatgtttgtatcattagctttttgtttttttaatcccacattttcggtttcatccccattattttcagttgaagcaatataatttgcatgtgagaaccagataccctttgtagtttgttgtcttttctcttcatccataacatcgaacttagttccaaataatttattcaaaagtgttgatttaccggttgattgagaaccaaaaactgaaacaatatgataatttaaaccattatcatcattagatttaccgacataacatttatccacgtattcatcgagatgtctagcaaaatgtttttcttcatcaatcaaatggactgataccattgaagtgtcatttaatccagtatttgccatatcaattaggttatactagttttcagaatgatccaatggatattgttaatacagaaacaattaaaagagtaattttattctaatcaatcactgatgaaattgatccttccaagggactgaatagcctcaaaatcaatttcaacaaaatttacttagtgttttataaatctcgcgtttatagtgaaatttcaatttttcaactgaggtggcgaatttcatttacatttccactacttttggtggctctgtttccttttattttaccttgtatttatttcttttctagtcaattaatatttacaatcaattagacaatacacgaatatgaatcttaactaaataaaacaatattacaaaaatgtttgtttaaaatgaacaaataagtatctgattattaactttcaagtctcatttcattattttgaaaatgctctatatttttgatattaattcctctttaaaatcattcaattgaatcaaaatttcagtatttcattaaaatcacctattactactcacatacattcttatatgctaattatcaaaagaataccctcaattagccactacaaatacatacaaatctatgccaatatgaactcgacgcatcgacgcgcgcatcggagttggaaaaaaggggaaaaaagttgagccaccaaaaatatttcaaattcattgatcttggaaaaaggggaacatgataaccataataatgaaatcataatagagaaatcacttctttgggagatactttatatatttgtttccctttttttggtatttattgtgctttctaataagtttccccttttcccacttttttggtttgtttgttatactttctttttcctccaaaactttaaaacttattatcttttcgttttttaacgaactcatagccagttagttactatacattaaagttttgaaagttaataccagatacttatttcaataatccttaaattaatcaattattaaaacttagaaatgtatttcaatcctaaagaatattacttcttttctgataaaatcaaggaagaattaactgctaattcattcccattctttggaactactgaatttattgaagctgatgaaatctaattacatcaaattcaacaaatgtattgtttctgttgtttcccaaaaagcctattagaactcaaatgtatttattatactgttggtcattaatctattattatttctcatgtagtaaattgaaaactgtttcatttaacaaaatgttgtttgatgttaaacctgctatgtttatgccatctgatgaagaaatcaaattgtatatgtctaatcctaaattcttatggagattttctgaagcaaattatcaatattttcttcaagttttttgatcctaaaagtgtttgtggtaattttcaaatgagtttaattacttatgataaggatgattcaccaatgatgccttatttgagaccaaagtttttaaattctatgaaactcaaactttcgaaattgctccatttaaatgataagccctttggttgtaacactgttgatgctgttttgaataaattcaaatttaagttaagtgatgatgaaacttgtgaagcttattattctgatgatttttatgaccataaaatgcatgaatattcaacatattcagattttgtgtatgttattttgactggtcagaataattgcttccctgctaaaccgaatcacttcagtaaaccaagaagctttaaacagttggtgaataaaaggaagcaaaattttaaaaatattgcacctttattatttagaaaagtaattaaagttaaaattgctaaacctcaaagaatcaagaaaattgacaaaaagaaagaaataattaaatcaagaagaactgaaactaataaacttgaaattgttccagttgttgaaaatattgaaaaatcattagaaatctctgtcccagttgttgaaattattgaaaaacaattacaattatttgtaccattacctcaacctgttgttgtcgattctttagacactaatactcgccattcatctgttgtaaatgaaagttatgaaataattaatatgcaagctgttgatcatgaagattatgaaataatggaagtcctttctgttggtgattctttggatgttaattattccacttcatctgatgaagatgataaatttgataaagttcatgaaatagttaaaattcaatctaaatctgattccaaacagagtttatcttcatgtgtgaacttattttccagtccagttagtaatgaaaacatcaatcaaaattcattgactccaattcctattaaatcaaatgaacttattattgcctccaacaatgttaatatgaaaccaattgataaaaatgatgattataataacaaattaaatcctgtatctgcttcttcaaagaaatccattgatgccactaattccaatgatatttcccctaaaattacttcttccatctccaatgattttgataaccataaccatatttacattcaatccaccattatggaatcaaaatcaactcctatcaaatcattagactcacctatttacattttttaccacttattaaagagtatccttttcaattcaatggtcagtgtaggaattatagcaatgcttttattatttacatttgaaaaatttacattagaatacaatccagaaactttagaacaatccacagaaagaattgcaaataattttttatctgactttgaattgaatttttactctaatgatttgatgaaactccctgaagatgaagatacaaataaagaaacagaaatagattttaatttgaaatttaatcattcagattttgaagttgatgaacttaacatgaaggaagcaaaaataaatgaatttgatgaaaagaattgctcaattattgagattgatacttcaaactctaacacgaactatgataactcacaaatgtcatttattatctcttatgctgaatacagaatatttgtaaaggtccaaccaatgttttatgaaggtgatgtttataatttctttgatacaacaataattgaaggtgattatatttacaagattgttaattatctcccattagattactcacatgatttctattatgatttacaagtaatggtttcatccaattttgaatgtttcaatacaatcaaaaatctactgctgaatgcacctaccaattattatccaggtgaagctgatgatcaaattaatcaaattgaatggaatgatgaaaatactaataatgcttttcaactgaattctaatttatttaaagttggtttatctggaaagaaaattaatatccatatcaattttacttcacctattgaatattatagaagatcttttttattaactgctggtcagaaaaaatttaaaaatgataaaaatatggtttcaatggtgacaaaaatgaaaagtaattatggatggttttttaagttaaatcaaaattaataaattttgttatgggttttatgatgtgaatatattcaatattttagttatattaataaaaataataaaataaatcaaataataataataataataataagtaaatcaaaataataataataattaaaaaaagataataaaatgaaattatctctttctcttctttctatttcccttttctcctgtgtaatttttataatactgcttaaaatgtatttgaatttttttaaactacgctgtagaacttataaaagtgagttacaatcttataaatgcatttcatttacgtttagatttaccattcttaaccacaaatacactcacaggtattccccaatacttgtttaaaaccttgataacctcagagtcttgactaccctgaatattaacaatcctaccatctttaggatctttagcttctgtaattgtacttgaactactacattggactttcaagatatcagctaatttttcaacatcaacataaaacttttcaacaccactgatacgtgtaacgtatttcctacgagatctaacattttcaacatcaatattaattgatggaactttacctttattgtatgagaatctcttcttctttaaaatgtcattactattttcatcaccttctctatataacatatggtatggagaacaagttgaaaccacacgatctgctaaatcggctctcttaatggctgttttaatattaaactctcttaaaatgtcatcaggttcaatactttgtggatccttctttgaaactatttgtgggttttgtttgatatataattgaacaaactgtttaatttccttttctgtgtaataagaatcatattctttgtcaattttgttgaataacattctagcagcatttttaggctttagataatttttcaaaattaatggcggttctggttgcattgaaacactatcatcagatattggggttgaaacaccggatttattatcattatttgcagatttcttgattctatatggaacaaattcggcaactcttggatctgaacgtggtaaaacggatacaataaccattttatcatctttaccttttagttttaataaattatccttttccatagcctttaaaaactttgcagttttcttccatgaagttttcttcatattgacaatattagtatcaacaggtggaagatttttcaagatatgacctgaaataaattgcgttgcagtaattggaaattgaattgtatcctgacttaatgtgtataaaacagatcttttaaacatttcatcaatatcttccgtactcatgacgtattcatctgattcttcttcattctcagtttctttaatttcaagattctccattttgggcacaacttcattatcacctgcactcttggtatttgaatcatcaactttatcctcaacaaccgtttctgatgtttcgtctactttaccagtttctgtagattcgcctttagactcttcttctacctttttcaattcggattgctctttctccgtataaacctttgcatcctctaatatatcagttagatttctaccaagctggttaagtttatcacctgggtatgtgaaaatattcacagcaacaccggaggaaggtgcagtatcattagttttaccttctaagtccattaaacattcaccaacagcaataggtatatttggtttaaggtaattcacaacagcaacaatagcaccatttttcaaaccagcaccaaaaggtccaatacaaccacgtatcattaaatttgcaccattcattaatctatcaataactgcatcatgtgtcatgatagttggaatacacacaaaattatcatcagacgtgttgattgataaatacagtccttgtagagttggaatgaaatcattaccatctctgagttgacagaaaattgggtccttagttgttgcatcgtaataaatcatacctttcttgatttctggagtgttaaatactgcctttgacatcttttcaggaactctgaaacctttcatctgtgtttcaatgtcattttttaacttccttctttcagaagatttcaaatttgcacttggcttaactttctatagtttttctgaacattactgtgtatatttttatgcaatatttgagtatattatcaaataacgaaaaaatcagaaagaaagaaataaagacaggaaaatgcatgataaatttcatgatggaaattttggcgtaatttccagatcttgatattccatgtttattttatgtatagttctttcaaaagtatccatagaagtaccattaataacatagaaaaaaccgtaattgaaagaagaatgagcttgggtacggcaaaacttccacatcaattatcaaactcatcatgttttacaatttgtcctcagatggatttattatcatttcaattgaatgatacagttatttggatttatcgtcaaggaaacgaaaaagtatgggatatagatattaattcactgaaaacagatgatgaagaaattaacggaactcaacaaaagctgatcaatcttgtttggaaacctgatggtaaacgaattgccatcgcatcaaataatgggaatctatatttattcaatgcaatgcaaggtaatctaataagaaaattgaaattgaatacagaaatatcatgtttgacatggaatgaatgtaaaataagccatactaaagctaaatcgaaaggtgttgatggaataatagatacaattgatattataggctcaatgccagcattgagatctagcataggaaatgtgaaaggcatgtcaaataaaaagaatcctgatagtaatactcataccaatataaacacaggattgaaatttattgatgatgaagatgatgattatccacatgatgaagaggatgataaagatgataaaagtttaaatgttatacttgcaggttcaaatgatggaagtttaacttacatttttggtaacatttttgtcatcgatgatatctgtatcaataacaacttcaacaactcaaaaatcattgaaattatacccaacaaatcattgacataccaatatgtgctagctgaaagtgaagccggttttagtgtttccaagttaagtacacaatttatttataatgataaaataatgaacaaggtattaatgatttcttcaaaactattgaatgtgatgttgtacttaaaaagagcaacaaagaaattagataataagtacaaattgtacatggattatactattagaattattgaactattaagaggtgaaattgctgaagatgaagagaataatatttctgatgaaaataatattaaatttgaaagtaataataccgatccaatttatgacttatatgatttacttttaacagggtcgttgtctaatgcaaccaagaaatggttaactgattatttaagtgatagaggtattaaaagatggtcacaattaggaagtacttatttcaataatgcaagaattacaatctataatcatattatttcatcactacaccatttcttcatatatttaactgatttgaaaggtttaacacagtatgatataaatagaaattttgaatatacagatcaaatagatgaatgtattaaaatatgtcaaacttttatgaaatacgcatatcaatttatgatcgagttgaaagaaaatgaacaacattttgaacaaacaattatatggttatcaaatatattatctgagataacaacagatgagaaagtcaatataacgtttaagactaatgatattactaaatttttgattttcattagtagtaagttaaactcgattgagagtaaaaatgatgatacacaaattgacatccacgatggcgataatgattattctaaaattaataaatttaccaatgttttgaatattaaattggataacctcttcgaaaaaatcaaaagagatgtaaaggaagagataattatggagaaaagtattattttaacaaatcaaccagatgttaacaaagaatataaatttaaaatatttgatactcatgggtttttatatacaactaagaattcacatattattatgcatagatttgatttggaaactttgcatgtaacttattttgagttcaagatcaacactgtctttgaaattatagatattgaaatggttagtgccgatatgttttccatattgtacgaaaatgttgccatttttaccaaacatcatacagcgataaatctctaacaatagcatgtacctataatttggaaaaaatcaccaatagtgaagaaatgatgaattttaaatcagggtatttagcagttaataaaacaggaaaatcattctgtgtattagattctgaaagaaagaggtatctatggctgcaaacctttttataaccatatattcataaatgatatttaaatctttgctaaatcatataaattttttatttcttccgacatttgctttctatgtaagtcaatgtctgatttattcaactcgcaatcattatcaatatagaaaatattgtccacgaatgtacaatatgcctctctcattaatccatccattcccgctaaatccatagcattgaaaactttcatagtttctttagacactggacgagttttcaaataaaattgctgtagttttataagtctattcaatctcttgttaaaaacacgacatggtgcaattggtcctccaaatctatcagcatctagttcaagtttcagtaatggtggtcccaatttcaaattcaatttggaattatattgttgtcttaaatgtatcagttttttcaactcttctgtagttgctatatgttggacatttgaagcatacggagtttcacaattgaaattcaattgtaagattttattcattggagtggattccatttgaacttgatcatatggtttctgttgaaaaaaatattcaatctgtgtgtgtttccataacttattatatcgatcaaccatatcagttgcattttgcttatttaaaaatgttatagtatgtgataatgatagtaagttaccataactcgcaacaaaatcaactttctcctttttatttcgtaatttgtagtttaaaaagttcgtaacaacagatggatatactgtttctaacttaggtgattcaatatgtgtatagtttagcaattccaatagtttatttgtattttgttgtttaaaggtgttatctgactggattaaatgaattatcctatttttttgcttactttccttggaatttaccaacactttttcaaggcaatcagtggtgtactcatccaaagggatattctttaatttccgagccaaattcattgtgacaggtcactataattgccagtgaaaagatgttcaaactactgaaatatgacgaatttttcaaaaatttcaaaatttccatattgacatgaaattctcaaaagggaaattaattatttgtttaccttaattaaacttcttcttcttctttttcttttgagattatattctaccttttcttctgtggttttagactcagttcagtgctagttgttgcaattaacatgtcagataataaacagattcatcgtagcaggttagctcatttgaatgctgcaagagacaaggaaaatgcccttagatttcataaaagcaattttaatagtaataaagatttaaaaattgatgtttcaaagaaagaaacagttgaatcatttggatttggtagaccaatcttacgttctaaatcaacaaatggattgaaagtaaataacaatcataatcacagtaataatcaaaatatcaattcaattcctaaacacagtataccattaaacaccaaaccattattccctgaatcagagaatgctaataaatcaagaaaaatcaataaacaaccaatttctatctttggaagtatagactctaatgaaaatgaaaaggaaaatgttgcatatcatgatactacaacattgcaaaggtcacattcacatatggaaattaatcataataatgaaaataatggtactttcaataaacgtaatactctctcaagatcatcatcagcttttggatcatcatttggatcatcattcaataattcactgaaaccaagaattaaatctaaattaacactgggtgctgataatgatatggcagcatttttcaaatcatctaaatttaatgatcaaaagcaatttggaataaataataaaactaccaatgattttgatactgcaattgatgggaaggataaaaataatgatagtttcaatgatagtagtatcgatatcagtagactggaggaagttacatttactgatgataatgatgatattacaatgatgaagaaattatcaacagatagaaattctcctgtttatcaaagaactcataaagttagtatacatacattattatcttcctcaactgataacgatgatattggagaaactacattcgattataaagatactgagaaatcaaaaccttatacactggttgatctggaaagtttaataatgtctaaacatcatgaggttttagaaccagaacctgaagttgaaattggtaaaatacaagatgatgaatttgaaattgagcatataccacatcataaaaatggaatatatgatgattctatccccgatgctgtattagatggagaatatcaaagtatgaataatgttttaggaaatctatggagtaaagataattcagcaagttcaataagttcaacttttaaagatccacttgatttaaagttcaaagaagaagataaaaaagaagatattttaaatagtatacaatctagtaattttgaaccagtattagattttgataatgcactgaaattagagttttctgatattgaagaagaggaagagggtgatgaagaagatggtaatgataaagataaagatattcaccaaattttaaaattctatcaagataaatcaactatataatttaaatctatagacctatctataaaactatatattctagtatgtaaaataatcattagctttgtttttaaatatattctattttctattctatgcttctatatgtacaagtgtcatcaccatccaaaccaaccaaaccattttgattttgaatcagttccaaaatttttaacatcagtattattgatataagtattgaaagttttaggaacactatttttatcctttatttgaaatactgttggttgactatcatcatcattatcatcatctgcattatttgaagcatctttacttttactttcattttctttactattaacatgacctaatacatcaattaatctatttttatcatttctctctaacatccaattatcctttgggaaaattatttcaacaccaacatataaatcaccatgagatgaaaggtaagaatttggaattggcataccttcacctttaataataattgaatcaccaggttttaaaactttacccattggaattttaatatttaaccatctattatcaattgttttaattaaacgattattttcaaatccacataatgcatcaactaaattaattgaaattttcgtaaataaattatcaccatctctgaaaaacattgaattattatttaattcatcatcttgaataaatttaaaatttaaaattgccttaccagttttaatatttggatattcattacccatactactcatttcaaccgtaccaatatttggtgaacctttttcaattttaaattcaacaatattttcatcatcaataactaaattacctttacatttcctacatttatcatcaggtcttgaataaatacctaaaccttcacattgattacattcaactctttgagcaaatgtcataccacccattcgacgatattcttgtgtaataccttgaccattacaaattggacaagttattttaactgcatttttccttaatccattacctttacatttaacacaaataattttccttttataagttttcttaattaatttaccaaaataaagatcagataatgtaacatcaatatcaaaagtaatatctaaatctttacttgtttgacgttgattaaaatctctatgattatttgttttcctattaccatttccaccattacctgtgaaaaattgtgcaaaatcgccttcatcaaagaaatttgcaccatgtcctccaccattactaaattcaaaatcaaaatcaaaatcatcgaatggattaccatttctattattatttggtcctccacctaaatcatattcattacgtttatgttcatctgataaaatttcataagcttcagtaatttctttaaatttaatttcactttcatctcttaattcaggtgatactttatcaggatgatatttaagtgccaatttcctataagcttttctaatttcaccttcagttgccgatacttcaacacctaatacttcatatagtctagtcattgctttatattaagcttaaagaaagaaattatagatcaatattaatattaaataaaaatatatactccacagtaaatcattttacaaagatttccttacataatacaaaatttcacaaaaaggtgtttaaatagctaaatagatagagtttctactgtttacaccaatggttcataagctgaattggtttcagtttggagatttctcccattgatgaacagtcataccatcatgaagtgtaattgtttcttgttttaatgaataattgaaaaaccaaggtaataatttaaacatgaataaccagtataacatgcataaaaataaaattaataatgaagtaattgcataatttggtaatgaactatcactatcactatctttagatgattgaattaacggacctaagaacatgaaaattgagaataaaatcatgaatgaaatatctaaatatgatgccttaatatgatgatcattttctggatttcttttacgtaaaattaaaataccgaaacaagctaaaccaaagaaaatttgtgttggataactctctaaattaattgcataattgaaaatatttgaatttgaaggtataattagaaatattgaagtaataaagaatggaattaacattgaagttaatggtgaattaaatggataatttgatgcaaagaatttactaaatggcataaaaccttctctaaaaatttcttgattcattcttgaaatatgatataaaactgttataatattaccaccaactgagaatgcaattaatgatgataaaataattttaccaaatgaattaccgaaaaatttttcaaataaaactaaaccaaccatttcattaatttctaataattcatctgatggtataacaattaaataagttaaattaattaataaatagcaaatattaattaataaaattgataaaggagcagcaattttcattgtattaattggatctttaatttcacctaaaacattatgagttgtatgccaaccattaaatgagaaaataccttttaaaattgctgaagtaaaggaagcaattgtaacatttgttttaacattgaaaaaatcttttaaatgtaaattattatcaattttagtaattgatgaaggtaaaattaaaacagataatcccattagtgaaacacataaaagtaaaataattttcaaaaatcctgtaacttgtttgaactttaataacaaattttgttgaacataataaaagtaaaatagttaagaatagaaatgcaaatccaattggtttactataactttccataactggaccatcatcgatccctacagcataaaggaaatattcaccaaatatgataacatttgcaataattgaaccaaatataacaatgaaaataccgaaaacaacattaattaacataaaaggtttattataaataattgaaagaaaaacttttaaaccaccagaacgtggtataattgaacctaattcagagaaacacattatacctgcataacttgaataacctgcaattaaccaaactaaaaagaataaaaatggtgaaccaccaacatctctataaatcattgcaggtgttgcaaatatacctgatccaataattctttgaactaccatcattataacatcagttacaccaagatgacgtccatgaggggtttcatcgtgtgatatcattcgtttgataaatgaaagataattaaagtaagatattattattaatcaacttataaacaaccttaattaaataaataaaactgtggattactgatatatagtattagataacaacaagcaggagattacgtaagaacatagcagattatatacgtatcatgtcttatatactcagactatatatgatactctaccacatgtacaataagtatactataatagaataaacataaagaacaaataataaaagaaacagacaaaagaaggtcaaagtaagttactgaccaaaaaaaaagtcaaatttttatatcaacataataaggctcatctctttatatccacacaccttctttcatcaatgccagtaacaacagttcagagagccactattcaaactcccaatggatggaatgaactctcattaccattaacaatctatcaaactggtcaaaacctatatttaggaaccaatatgatttctaacataattaaaatatatatcagaggaaatgatattttaattaaacatgcacaaggtaaattacaaataactctttctagtacaaatgatattaatgaatggtgtacattttggaaaaatattggtattgaagtaaagtataaggatgataatgaattattaaaattaatcaatgataaattatcaactaatgaatttaaattacttgtaagtatggaatatacagactctgttatacaatataatatatactaacatttttattatagatggataggattgataaattattaagccaataatgccataattgttaagaaaatagcatgagggacataaggtgtaattatattaccatttgcttgtgatgtagaactaattgaagaaacaatattagatgaagatgatgaagtggtagcagatgatatagttgatgatgaatgacttgagattgacgcagttgatgaaggtattgaagaaattctacttgttgaaacaacttgtgatgaagcaattaaatcattattagttattgtcataacatgataatcacttggaactttaaattcagtcatacttaattcattcatataagtacttaaccaatcaaaatttgtaataaatgttgcaaattgatcaaatgggaaactttgaataaataaactagttgcaaaattatcaacttcataagtatttaattgaatataaaattgcattaattcaggtgggaattcaattcctttactttgcattacactttgatatttattattctcttgtaatgcatcaagtaaaactgtattaataaaagtttcttgttcaacaattgcatatgatctttcttcaagtgtatttgttaatgttgtggtaataacatttgctaaaatagatgtaattaatccactgattggtattaatgttgataacttcatccttgatagtccaagtacattacctattggaaatatattaaatggtggaattactgtttcttttatagaaataatgttaatattacccttttgggacatcaaagaagaattatgaaattttcatttcatttcatttctttttgcaaatggtatctagctattttaatatctacttagggattatacaatgataatgataatgataattaatattaataatgattaagaaaaagaaaaagaaaagttgcactacacaactaaccacgtaagaaaccttttcttgtcttagttggttgttgttgttgttgttgttgagaatttagtaacattgaagattgttgttgttgttgttgagtatgactaacaccagttgaaccattttgatcaatcaatttattatttgattctaattctttctttttatcttctaacattttaatttgttttaataatttatccctcatttctttatgtttactaaataaatcagcttcagtttcttgtaattttttctcttctctattaactttttgttgaaaaatttgtttcatttgattctctaaattaactaattttaattcatgtaattttttttcttcctcttgtttaagaattggatcaaattctttgaaaactgaatcattttgaattatacccattttagttaatttatttaatctataattttcatataatttatttgatgttaaatcttttaaatcttccatataatttctaattaataattgtcttaatttaataaaatcattatgtaattcattatcaatttcaattttaccccaaggatattctctacctctaacaaatctaccatcatctaatttaattaaattatttgaaccaacaattgcaaatggcattttatttaaaatatttaaattttcatcatcttcaatattattattattattatcatcattttcatatttaattggattaaaaatattaatattttgattttttaaatcatttttaatttttaatttaaaattttcaacttcagtttcattaagtatatcagattttgcaataattggaattaaattaactttttcatgaattgatttcataaaattaatatctaaagattttaatgaatgacctgttggttcaataaaatataataaagcatgaattctttcatcaataaaatcatttgataaattatttctattaattttagtttcataatctaaataagaatcaaatcttgaatcaatttcatcaataattggttgaaaagaatttgaattattaataaattcaccaaatcctttacaattaataatttgtaaatttaatttaacattattttcttcaataattgaatttatagtttcaatttgaattttatttaaatcttctaaaggtttaatagttgttaaatcaaataaatctttattaaataatgtattaattaaagttgatttacctaaacctttctcaccaacaatcattaaattaaaattaaaaccttttctaattgatttcctatgccattgttttggtaaattagcaaatcctacataaccatttaatttacgtttaatgatttgggtagtatgatcattagaagggagtaattcagccattgttactattcctgttgtcttaaagaaccaataacagagcaagatcaagatcaagatcaagatcaaaaaggaaaaagtggcaaagaatccaatgtaaacacagtctgaggaaaattgcccatttcgtaataaaataaaattggaaaataaaattaatattacattaaattaaagagacgcgttgtgtattaatagaggtatataatagaggtataatctcttatacacggacaatgtacacaccatcagatagtgttaggaagttagtagaggaaggggcagaatgtatggccaagaaacaatgggaaaatgccgttgatgcgtatagtgaagcatgtcaagtttataatttagagaatggtgatgatagtggtgaattattagttatgtatgcaaaagcattaatagagaatggtattaagaataatgatgttattgctggagagacgggtgaagaagggggagagggggacgaggaagaaggtgaagatgaagaggaggagggtaaatttcaatttttcaatggagttgcagagaaagatggtgaagttgaagaagtagaggaagaagaagttaaagaagcagaagttaaagaagaagctgaaatagatgatggacctaatgattttgaaattgcaatggagatattagaagttgcaaaggaacaatttattaaacatgataataaaatacaaatagctaatgtttatgtattacagggagatatttatttagagacagatcaaggaattgaatcaatgaaaagttatcaagaagcagttaatatattacgtgatgaaaaggatgatattaaacttgcagagacattagttatgttatcaatttcacaagaattaaatggtgaattagagaatgcaataaaatctatgaaagaatgtatttcccttggtaaagaatggaaaagaaaaggtgaaatggaggtacgattagatgagttaagtaatagattaaccattgaagaaaaggagaaggaaaagatgaaagaaatggctaaaagagttgttgaaagtaatgatttaacttcattagttaaaagacgtaaaaaatagcgagtattatgtacatatcttatataacactttctttttgtaatgacatatccacttaatttagaactaccatgggtagagaaatatagaccttatacacttaatgatatagttggtaataaggaaactattaatgcattaaagaatattgcaaaagatggtaatttaccacatttaattattagtggattaccaggtattggtaaaactactgcagcattagcattatcaagagaattattaaataatgatgaaaaattaattaaagaagcagttttagaattaaatgcaagtgatgatagaggtattgatattgtacgtaatttaattaaaacatttgcacaaaagaaagttacattaccatataatagacaaaagataattatacttgatgaagcagattcaattacaagtagtgcacaacaagcattaagaagaacaatggaaatttattcaagtagtacaagatttatatttgcatgtaatcaaagtaataaaattattgaaccattacagagtagatgttcaattttaagatttaataaattaggtgatgaagaaattttaaaaattttgaaaagaattttagataatgaaaatattaatactttcactgatgatggattagctgcattagttttcacaagtgatggagatatgagacaaggtattaataatttacaaagtgtttattatggatttaaaatgattaataatgaaaatgtttttaaattagttgatacaccaaatcctattataattaataaaatgattaaaatggcattacgaggatcaattgatgaatctatagttatattagattccctaattgaaagaggacattcatgtattgatataattaatatatgttttagagttagtaaaacattacaagaagttgataatgaaacagttttaacagtgttacgtaagattggtgaatgtcaattgaaaataattgatggtgtaagtacaagattacaattatgtagtttattaagtagtttgtgtagttaagtagagtaatgtccacagtattagagagacttaaggccaaggaagctaagagaagggagactggagaggataagattagagcagaggcagttaagaggaaggttgtagtgaaggagagtgaaatacaggatattattagagatgtagtaagagaattaccacaaggtactagtcatataagtgttaaaagacttgtacaaatggttagtgatagtagagatggtaatatagatgttgcagttgttgaaaaagtagttaacaagatgtactctgtatcaatgaatgttgtctctcttgtgtaaagactttattatattaatatagaatattctcgaaaatttactcattttttcactccgatttcgcactttgggaaaaaattccattttttttcccacttttcttataaatgaccaacttcgtccattttatttctatttttcaccattttctattatttgccactttcattttcatttacgtctcttctttcttttagacaacccactcttttgataatgctttcatctgtttcaaagaacgctgctactaaaatcccttctaactttgttagatataactccaacaaggttcaaggtacagttattggtatcgatttaggtaccaccaattctgctgttgcagttatggaaggtaaaactcctaaaattattgaaaatgctgaaggttcaagaactactccttcagttgttgcattcactaaagatggtgaaagattagttggtattccagctaagagacaagcagttgttaatccagaaaatacccttttcgcaacaaagagattaattggtagaagatttgaagatgctgaagttcaaagagatattaaacaagttccttataaaatcgttaaacattcaaatggtgatgcttgggttgaagcaagaggtgaaaaatattctcctgctcaagttggtggtttcgttcttaataaaatgaaagaaactgctgaagcttacctgggtaaaaaagttacttcagctgttgttactgttccagcttatttcaatgattctcaaagacaagcaactaaagatgcaggtgctattgtcggtttaaacgttgctagagttgttaatgaaccaactgctgctgctttagcttatggtttagaaaaggatgattctaaagttgtcgctgtctttgatttaggtggtggtactttcgatatttccatcttagatattgataatggtgtctttgaagttaaatcaactaatggtgatactcatttaggtggtgaagatttcgatatctctcttgttagatatattgttgatgaatttaaaaaagaatcaaatattgatttacaaaatgatagaatggcaattcaaagaattagagaagcttcagaaaaggctaagattgaattatcttcagctttatcaactgaaatctcattacctttcattactgcagatgcaactggtccaaaacatattaacttaaagatgactagagctcaattagaaaaattagttgaacctttaattaagaaaacttatgaaccatgtaagaaagctcttaaggatgctaatttatcaacttcagatattggtgaagttatccttgttggtggtatgtcaagaatgccaaaagttattgaaactgttaaagaaattttcggtaaagaaccatctaaagctgttaacccagatgaagcagttgcaattggtgctgcaattcaaggtgctgttttatcaggtgaagttaaagatgtcttattattagatgttactccattatctttaggtattgaaactttaggtggtgttttcactagattaattccaagaaatacaactattccaactaagaaatcacaagtcttctcaactgctgcagatggtcaaacttctgttgaaattagagtcttccaaggtgaaagagaattagttagagataataaattaattggtaatttcacattagcaggtattccaccagctccaaagggtgttccacaaattgaagttactttcgatattgatgcagatggtattattaatgtctctgctaaggataaagcttctggtaaagattcatcaattactgttgcaggttcatcaggtttaactgatagtgaaattgaaaagatggttaatgatgcagaaaaattcaaagaacaagatcaagctagaaaggaagcaattgaacaaactaataaagcagatcaattatgtaatgatactgaaaaatcattaactgaatttggtgataaattagataaagcagatgcagaaaatgttaaaaaattaattactgaattaagagatttaattgttaaagttaatggtggtgaaaatgttgaagtttcagaaattaagggtaaatatgaagaattacaacaatcaagtttaaaattatttgaaaaaatgtacaaaaatcaacaatcatctgaagattcatcaaaatctgatgaatcaaagaactaattgtaaatataaataattaattaactaatataatatatatcttgtctataaacaaacaattttatgatgaactgaaataatttataaatttatcaaaatgattaatagtgtaaaccacaatacaaaacagtaatattactaaaaaattcttcaatttatgattattaggtgtaaatctccaaccaacggttaaagtaatcaaattacttacagttaatttaaaaatatcagtccaatcatagttcatactataaattatctttaaataatccactaaaccatcattatttaaaccaattataaatactgaccaccaaaacattaatgaataatatggtaaattggaattaatattaaaatttgcatatagaataattggaatataactgaatatgaagtaatataattgactaagtagtgattgatccattgatgttctacttaatgtcattgtagttttttggttgtattaagaaaaagcaattagttgaatccttgcagaacaactatacgtcgattggttttacaataaggtttattaatgccttgtgcgtaatcttatacttagataataaacctagaataaggtattaataaaatatggcacttataccatttactttactcgttatataaatgttctatcaattcattaaagatatagtatttgtccttaagataaagtaaaggtatagtaaaataaagcaatttagtaagtaaatttgagaaataatttttcactaagtaagtaataactattaagacaatctttcttttaagacagtgacaaatatgcagaatccattcctaccaccaccttctaaaccattaaatgagatgacaccagaggaacaaggtgaagcaggtgcaaaagaaattatgaattttatatcatcatgtccaggtaaggcaatattagcaggtggttcaggtttcgttcttggaggtgttttcggatttttcatggcatcaatgtcatatgatacaccattaggtattggacaaatgggtggagctgcagctttagctcaagaaaaatatttagaattaccattaaaggaacaaatgaaaattcaatttaaagatgtttggaatagaactaaatcaagtgcacgtaattttggttatattggtttaatattttcaggtgttgaatgttgtattgaaggtttaagaggtaaaagtgatttatataatggtgcagctgcaggttgtataactggtggtggattagcattgaaaagtggacctgaagcagttttagttggttgtgcaggttttgcagctttctcaactgcaattgatatgtatatgagaagtgaaaatggtgctccaccaaagaatgattatgatcaataaagaaccttgagtgaaacgaaaggttcgtatatgtcttcaatttgaacaagctttacgaagattaatgtataaaaggtataaatttgtaaatagaatatagagtaggataaataagataatatcatgcaataatactacttctaccttctctctctaatggaggtacagcattaaataaatcttttgaagttggataactacctaacataccctttgaacttgcaaattcatttgatctaattgtattagttgaataatattcatcctcaattggatgcagtaaaatatttaaatttgaaattgaaactgtactattagttggaactgaaatccaatcatttctttcaaatgttaatggttcacttgcaatcattactaaattttgtgatttattcattctttccattttataacgacctggtgaatattcaacaaaatttgatccagttgaaaaatataatgatgcagcttcatcagttttagaattaacatatcttgaaacaactatattaacaccatcagttactgcaaaatttaataatgatggatcattattattactatcaccattactaacttctttaacccaatctttaatatattgaatactatcagtaagtgctttccttaaaatatgaatattaacaatttctccactatttggttcaaatccatttaatctaagacaatgtaaaaataatgcaaagcaacattctgaatctgttgatccattaatattaataaataaatcttcatcaataaaattaattaatgtacgtttaatttttgggaaatttgatataccaccattatgcataaacattaaattattaaaagtgaaaggatgacaatttgtttcacttaaaacaccataagttgaagctctaacatgtgcaaatattaattttgaacttgtcttttcactaattctttgtaaattttgattattccaagcaggtgtaattgccttataaagacatggacttgaatgatcatcatcaatataataaccaacaccaaatccatcaccattaactggttgtgcatcaattcttaatcttgaatcatatgattgattaataatagaatgttgaggtctagtaagcagatgagatagagttattggttccttacccttgtaaatcaagaaacgacacatattaaaggaagaacaatcatataatataatgttgttaaaaccttcgattagtcacttgcatgaaaaaaaagttattatctatttccacttcctttacttcttttacttcttctgacaatgagtgtgctacgaatagacccggaactggatgatgaaacgttgggtaatactatagagaatgcacatttatggcaatacattagtgatagtgaagatgataaaactattgaagaagaacttacaccaccaaatagtagtagtatatcatttgatgtgagtaccggggattatgcagaatgtttaattaccaaagtatttaagaacaagggatacattaattcaagtaattcaagaactataatggttgcatataaaccaaatgacacgctggacgttgttaaatggacaattaattcaattttaaatgataatgatatattggttgttatagaggttataccattacataattatttaaggactggatttaattataataaagataaagagaacttatttgaatcaatgaaatccttaattggtgataaatgtgttgaaatagtatatgagagacgtgttggtgcagtttattatgcaattaatagagcaattaatgattatgatgttacaatggtagttataggtaatggagaatataacaaggaaatgattgataaatgtaaagtaggagttgttatcgttaatgatttagaaattagagagaataaggatgatgataataataataataattcaaagacatttccaactattcaatcattaacatatgctataacttcaacaccattagatttaccaacaaagagaacttcaagattcctaagaggtgggaatcttaataatctattatcaccggtatcatctaatgaaagtatacgatctttatcaccttttaaactattcaaacgaaagtaatttaacgtctatattctataataatatattatatatacttcttctattctttagtatcataaacgatagtaactggaccatcattaacaatcccaacatccatcattgcaccaaatacaccatctttaacactttcaacacttaatccatcccttaattctttcaagaaagcttcatataattcattagctaaatgacctttctgtgctttatggaaatcaggttttgtacctttcttgatagttgcataaagtgtaaattgtgaaactgataatatttcaccttgaatatcaataattgatttcatccatggtttaccaacccattcagttgatgtaccagctgattgatcaatatcttcaaataatcttaatttaagtattttattagctaatttactaacatctgcaattgtatcttcctgtgtaataccaacaagtaaacataatcctttaccaatactagacactacagcattgtctactgtcacagaggcactcttaactctttgaataacaactctcattgtataaaaagagtattatacaagcttatacaccttccttaatagtgataagtggaaaaagtgaaaattttcattttcattgttatttattatctaaaatcttccattggacgataccattttctttctttaaagtatatcctatactgtatcatataatacagctaatgatgtctgatcgtcgtccatctattgttgaaagaagaccttcatctgcattatcttcaagacgtccttccattatacctcaattagaagggattgaaaaacctaatactccgaatttaccggagaatatgaatgttgatgttttaatttgtggtacaggtttaattaattcaatattagcagctgcattatcttggcaaggtacatctgttttacatattgattcaaatccttattatggagatgattcagcaactttaacaattgaacaaattaaaaattggtttattggttcaaaatttaataaaacaggttttaaaaattataaaaatattcatttatatattaatgataatgattttaatattgtatcaaaagattatggtattgatttatcacctaaaatattattcccacgttcttcattattagatttattaattaaatcaagagtttatcattatttagaatttcaaagtttatcaaattttcatacttttgaaaataataatttaggtaaattaaatgcaaataaggaagatattttcacatcaaatgaaattgatttaaattctaaacgtaaattaatgaaatttttaaaatttatttcatctccagttattgaattacctgataatttaccaaaggatataagtattcaaaattttctgaaaaaaaattttaaacttgatgataaattaattaatgaaattattttcaccttaggattaattaataatcctaaaattcaattaattgatgcattaaataaaattaagagatatattttatcatttaatatttatggtaatttcccaacattatattcaaaatttggtggaccaggtgaaatttctcaaggattttgtagatcagcagctgttgcaggtacaatttacaaattaaatactaaattaaaatcttatgattttgaaaataaaactgcaatacttaatgatggatcaaatattaaaattaatgaaagaattatttcaagtttaaatcaatcaattaataaacctgaaaattgtaaattttatgaaatttcaagaattattgcaattgttgataaatcatgtaatgaatggtttcaaaatggtgaatcatcatcaattataattttcccaccaaattcattaaattcacaaaatgaatatcctgtacaatgtttaataatgggtagtgaaactggttgttgtcctaaaggtagatcaatttggtatttacatacaattgcaccaacaattaatgatattgcaattaatgatttaaattcagcattattaaaattagaggaaaattatattagagagagtacatttaattttaatgaatttaatgatgatgatttaaattattataataataataaaccaattttaacagagagtggatcaatgaaattaagtaaaagtttacttgattttaaatttaaattttcaaatgaacgtattaattatttaatgaaattaagttttacacaattaacaaatattgatcaattaaatcctgaaaatattaatggatataataaagaaatattgaaaactgataataatattataattgttaatatgccatcaagtgaattatcatatgatggtatagttgaagaggcaaagaaaatttataaagagattgttggtgatgattctgattttttcaatgttgattttgaagatgaagaagaagagattgaaattagtaatgaattagatgctgaaataaaggcagaagtagaagaggttattaatgttgataataatcaaactactcaatctaatcaacaaagtgaagaatttgaaatggaattagagagttagtattgtgtgtaagtgtatatataatataactagtataataatattaaattaaatgtatgaatttttgataaagattaagattattaattaaacttataatatataaattaatatacatgtagatacattatttaaccttgtaaagattctaaaagaatgtttctttcttcagtatctgcaccccatttagtgacaacaacacaagaagcaccgacaacttttctagcattaccttctctatcaacttgacataaacctgcccattcacctaattgtttagcatcagaaactttaattaatggaactttttcatcaccattacataaagcttcaactaaagttgagataccttcttcagtaacagcatcacaaagaacacataattgagcttcacctctagttaaagctttagttgcttctcttaaacctcttgctaaaccatcttgaactaaagcagttcttaaaacttttttaatacaatcttctaaggtaactgaagtttcttcttcaacgacaacttcttcttcgacaataactggttgttcttcaatatcagacatgtttatgtatacttcttcctcagataaatccggtcagttgataaattagaaaggaaattaaaatatctaaaatattcaatctctaagatataacaaccattatgaaaaattcatgtaagtaaaccaatatagtaattatctcaaagtgaggaaatttgaaaaattttgtaaaacttttcactgtcacagaaaaacttcccaattgggaaggtacgcgtaaccctctctcacgtgactttaacacaagcccttgtgtgtggcacgtgatatagtttattttctttttacaacatgaaagataaagatcagttaaggtaatgtaaacattaacaattgtttattcttaaatcaatcagtcaatcaatcaattaatttctatatataccccccccccccccccctcccactatgaccaaaataactatacatcacggcattaaaccaacttcattcaagaataaaccaattcaacaaaaatggtttgatacattaataggacttttctattatggttcagtatccccacttttaactaaacttgaaaattgtgtttgctttttattatttttaataattgctttcctaattataattggttgtaaaaattatatttggccattagttagtgtaataaaattatgagtgctttctataaaatttttatattttatttatttatttatttaaatacataaaattttctatttctatatattatttaaaatatttgttaatgtttctttatcagaatttgttaattcattaaatgttaaattatatttatcaacttcatttgtttgaatatttataatgaatgatttaaattgctcaaatatattaatcttatctaaactattattagaatatggatcatcaactaattcatcaatttcatcaaatgaaaatttattatttgcatcaaatgaatattcaaatccttcatcatcttcttcatcatcaaagtctttaccttcatcaccttcaccatcatcatcgtcatctcctgcttcattaattttatatgttaattcattctcccaattcttatcagtatattcttcccttctcttttcaagttctttaatagctgttggtattttaaataataaatttgataaattattaccacatgttgataatatatttgttaacatcatattatttaatgaatttaaatcaatacttaaaattgaaatatatcctaaaattgataatttcatatcgaaaactcttttaaaattatttgtaaaattaaaccatttagttaagaaatattcaattgaattatcttcaattaattttttcattgttgtatttggatcaattataattgatgatataattgtatttaataattggattttaaaatttatacctttttcatttaatttattatcaatttttttcaaatatcttatactatatgatataataattggtaaatatttaccactaattgaattatttaatgataatataaatgttgttgttaaatcacaaatattaccaatatcactaaatccaattatatcatcatcaaattcatcttcttcattagaattatcacccatttggaaaactgttaaaataattttaaaaaataattcttgaatttcattattattttgaaaaatttcacctccataaattaaataatttttcaatgctggtaatgaatcttctaaatataatgtaatatcttcatcatttaataatgtattaataaaattatttaataatgaccacataattggtgatactttccttgttaaaaataatgtattttcaattaattcacctgcctcggcataaaaatcttcaattttattatcaaatataattttaattactttactataataaatttctaatttatcgattatttcagttgaattttcaaaatataataaaattgtaatcattgtatttaaaatacctaaagcggttgaagttttatcacttgttaaattttcaaattcatcataatcataatcttcatttgaattaacattatttgtaatttcattaattgaatttaataatgtaattaattttaaacttaattgttccattaattgttctgcaaatggttctaattgttcagggaatgattcaactaattcttgcataacacttggtaatatatcactatcaaatttatttgataaattcattaatttttccattaattttaaaacataacctgaaattaattttttaaattcttcattaacaataaatgtttgaattgataatgcactttgaatttcaattggtaaatgattattttcattattcaaaaaattattaattataccattgaaaatattattgattgtttcaaaattttttaaatcaagtgaatcaaattttgaaattaaattacatgttcttgcccttaaaaatgggaaatttgattggaaatttggtattatataattattcaaaaatggttcaacttcattatatacaggatttttaacttgtgataatttatatgaaattggtgataaaaatttcattaaactttccttacccttagcaatttcaattgtctcagtttgattatttaattcattaaatttatttataacaaattgaaacattggaactaaataatcaactcttttttcaactaatgtgaaaaaaaatgaatgtaatgcatcttcaccagtattttcatccataatatcaaatattttatgaatatattcctctggttcatcttcaaataattccaaatcttcatctgttggattgaaaattttgaaagatacattaccaataattaattcaaaatgtggttcaattaatttaaatgtatctttttttaataaacattgttctaaaaattcaattaaataataaatatttgaatttgataaatatttaccattaccattggagccatcggttgaccaatttttcaaattttcaatataaacattgattaaatttggtaaaacattttctttaaaagtatgtctaaattcagaataatcgaattttgatgaaagtgattttgtaccatatctttgaaataatctatataaattatgataacaccatttttgtgatttaatccaaccaggtaatgaatcttcattaaaattagtattaataacattaacttggaaagtaatccaatcaactaataattgagttgattgtaattgtaatgggaaatccaaataagtgacaaatttataacatttaattattaattttaaattttctgaacattcaaatgatgaaattaaattttgataattatttaaaatttgattaccaatattaagaataattgggaaaaaattattaataattggatctaaagttgatgatctctcttgatttgatctccatctaaaatttctacagatttcagtaaatgaataaattccaatatataaattattaattgaaatttgattttctaataaattattggaaattaaatcattaatatgatttaataattcaggccaatttttaggataatcatatttaataattaatgataatgcaggtaataattgatttcttaaatttttatctaatttagttataataactaataatctttcccttataattggtctctcatcagtatctataagtttaccaacagtccaatttctcaatattatatttttcaaatagatagaacatgaagttttaacaattggttgaacatttccatttgaaattatatctaaacaagcacttgaaaatccaatttccccactgaaagccttaagttgagtctcactttgacctctaatattaggatcggcctgtaaagaccctaggaaacactcatgcaacctctcaacgtccatccttgcctaaacgaaagccttttcgaagagaaaacctagctgagcaagctgagcaagctgagcatttcatgaaaagcagtgaaaaaaggcaaaaattaaaaaaattgcaaaatctgtgcaccctcataaaatttcccttcttcatgaatttatcacctatttcccctcttgtatctcttgtttaagtataatatatctcttctttaggacaaacaatacaatacaatgccattcttagttacttatagaccggcagtcttactcttcttctttatcagacaacccgttgctgctgcttccattgttggaatgtttgctctttgggaagctgatagaaatttaggtttaggtataagagattctttcaatgaatggagacaaaatcaattaggttttgcaactgttactacacaatatgaagcatttaagagaatagatgaagctaaaagaaatgaaatgttacttaaacaataagtaatttctcaatatttatttatttaacctaaatacacactttatatcatattattagccaaaaaaaacgattcattatttacaagtaataataataataatacactttatacaaatctctctttataaacctccctttttacttattctgtaaagttcaaaaattgcagcaggtgtaataccttgaattctacgtgcttgcccaatactttcaggtctattctcatttaatttacttataacttcacttgataatgatggtatattcctataatcaaaattatttggcaatttcatattctcatctgccttgaaagcttttatatattccttctcctttttaatatacccttcataattaccttccactgttattttcatcttaattctatcatttaattcatcatttaatttagaatcatcaataattttcaataattcattaattgatgatcctttataccttaatatctcatatgcagattttaatttggaatcattaccaatattaatatcaggtaataaattattccatttattactacttaatttaaattctcttaatttattcattccatcattcataatttttttatcattactaaaactttcccatctttcatcactaatacaatttaatttcttacccatttcagttaatcttaaatcagcattatctgctctaacactaactctaaattcagatcttgatgtaaacattctataaggttcctcaactcccttagtaattaaatcatcaattaaaactccgatatacccatcacttctatctaatattaattcctctccattacctctctcacttaatcctgcattaatacctgcaattataccttgacttgcagcttcctcatatcctgttgtaccattaatttgtccagctaaataaagtcctgaaattaatttagtctctaatgtacttttcaattcccttggatcaatataatcatattcaactccatatgcaggttttaacattttaacattttctaaacctgtaatattctttaaaatctcatattgaatatcttcaggcattgtcattgatataccattaggataaattatatcatttttaaccatatctaaactttcaggttcaagccaaactctatgttgtaatttatctgaaaatcttgtaattttagcctctaatgatggacaatatcttggacctttaacagtttcccttatatggaaagttttatctaaattattcataattaattctttaacttttggtgttgtataagttccataacataatatttgatctttaatatttggtctttcattaaggaaactcattggttcaggtggattatcacctatttctttactaactaaattataattaattgatttaccactaattctaggtggagtaccagttttcaatctacccattaaaaatccaatttttttaaaagttttacttaatccaaaacttgaaatttcatcaattctacctgctttccaagattttaaaccaatatgaatttcaccatctaaaaatgtcccagtagttataacaactttatcacatctaattaatgtaccatcagttaatacaacacctttcactacacctctatttctacctaattgatcattattttcatcataatcaataattaaatcttcaattttcccctcaattatatttaaatttttataacctttaataaacttttgcatttccattgaatataaatctctatcaatttgagctctatacccccaaactgctgcacctcttgacctatttaaaattttaaattgaatacctgctttatcaacaattctaccaacaataccatctaatgcatcaatttcctttaataatgtaccttttccaatgcctcccaaatgcaggattacaactagttgcgccaatattatcccatttaggggtaattagagcagttttgataccacatctagcactacccgttgatgcttcaatacctgcatgtccacctccaacaactataactggatgatagatagattttgataacttattggatatatctaaatcataatgtaatgatcttttaaatatcttacttaacataatgttgatggttaatgatgaatcaataattaatatataagataaaagttaccaaattgagtgaaaaattttataatttttttgataatccatgtttatagttacgtaaggatatcttataggtttatcttgtattgtattaactgtgtttattgtattttaagagaatatgtatgtagttaattaatcacgaaaatgatgaatagtgtctgtagtgtcaatggtttattttttagtaaattttgcaattttaaataaaattatgttactagactttgtaatatttcttaatttgttaaatgattacccatatttgtgcaataaaatcaatatttatcattttttacctctattttacaccagataacagttttatcagatagagaaagtgtcaattagtactatagacagtaaatctcctctgagtaataaatttgcatgtggtttcatgaacagattctaaatatcatgacaataaaacatgttgtagtagataatagcgaaaatagataaggataatagaaatacttcttctatattataggtttataatataactgtttattatttatatatacaagagtaataatataaaatgtataaatgtataaaagataattaaattaaattaaattaaattaaattaaattaataaaacttctcaccttgatcaacaaacataccattaaatccttcatcacttggtaatttagtatctaaaggtttatataaataccaagcttttaaagctttattaaaagatttaattctagcttctcttaatgaacaaccttcagcagttgataataaattttcaccactaaagcaaccaacaacataaacaggagttgaagataatctaccagtttctgaaattaatttaacgactggaggttgtaaattatttgattttaaaatttttgataataatttaccactttccttaaattgaaataatgattcaatatcaatgtgtcttgataatatatgattattaataaaattttttattattaaatcattattatttgaatgaatatataaacctgcaattattgaacgtacagaatttgcataagcttcagcttttgataattcaaaagtatttgtattttgatcatttgaatatttagtaacattaatttcaggatttgttactttacgtatatatcttaatttaccaaatttgaaaatttctggttcatttgataaatatttatctaattttgaagttaaatcttcttcaataccccaattatttttagctaaatcatataatgaaaaatctccaatatatgaatcaattgcagattttaaaattgaaattggtaatcttggataatttgtcattaaatattctgatatataaaatgataaaatatgagaacctaagattgataattgttgattattagaagataaatttgaaaattcattagttggacaagttaatgatttaactaatgtattaaaaggataattttttggtaaatttaatcttgcatgtaatgcaacaattgaaggtattaattttgcttcatcatttgaaagaagtgatatactactactactactattattattattattataatttgagaaatctaatttattttcaggtaatgataaattattttgattaatttgcttattctttgcattttcataagagaatttaaatttatgattaactgaattattatttaaattattattaatagtatttattttagaaattgcaggagatattgaaataaatctctttgcaatatggatagaagaacgattagatgcaagcatgtcctctattagtttgatattacttctactactaacttcaatgaaaattccatgataatattccaacacttagtgaaaaaaagtgaaaattaaaaaaaaaatggacatccctaagagaaaaaagatagacgcatcgtcgctaagtaaatcacagacgcgtcgagtggtcgattactttttttcaattacttactctctcattggtaattagaagaggggatctcatattgaatttgttaacatgaatttattataatgtaaaaggtgtatattgtattcctatagaaatcttttcataagaacaactatgtcacatcctcaatttattcctaaatgggttacacctccaactggtggttggtttcatactcctaaaaatcatcatgctaatggtataatagcatttgcaggtttctttgcaatactttatggtttttataaacaagctgaaaaaaatacagttaatccaaaggaagcttattcaatggaaactgttgctaaatgggaattagctgcaaagaaataaattattctctttatatacttatacttatacttatttatttaatatacataaacttttaaattaggattcttatctttaatttttttaattaattcaaatgtttcacaataatctaaaacactacgtaattttgaatcaatataattatctaaaataattgtatcaatttcctcttcctttaatgttaatccatcttcaaaatttctttcaacatcatttttacttatctctaaaattttatcaattctttcaactgttgaatttaaaattctactccatgttgtctttaacatttttaaatcttgtccaattggatttttattaattaatttaactgatccaccttctaaatctcttgttgctctatgaacatcacatgatctaattgctgaaattgataatattaatataaattttcttggtggaatttcaactgtcttgttgaattttttattaaatttcttcttcgtttcaaatttcttaatcttatttcttaatcttttatattctttaatacttggaattaattctttcataaaagtttcaataaaattacttaaatttgttaaatttttttctttattgtattcactcgtatcaataacattctccttcttaagataataatcacttaattctaatggtgataaatttgggaaaatttcacgaattttactacttatcttttcaacaattatatcattcttttcattacttaaagatttcttattctctttctcaaattccatcttttgtttcttttgtgatttactttcttcacttttgttttttctctttttaccaacaactattgtagtatcttcagtagtatcttcagtagtttcttttggagactcctcctcttcttcaatttcaacaccttcttcatcatcacttaatttataatcaacagcaagtccatcatctaatccttcaacatcttcaactttattcttcttttctgcaacagtcatctttgtctataaaaaaaaaaaaagaaaagaaaagaaatctagtaaaaaaagattaaaaatatttttcaatgaattaaaaaaaaaaaataatttttatttttctacacaataatagaaaaacacggtattcaaccacaacaatctcttatcaaccaatgatatcacaatcaccacaacgaccaacaactccacattcaccacataccccaagatcccctcgatctccaagaactccaaggaaatctttaactccattaaccaaaagagcattggaaatgtcagtaactccaataaggaatagattattattaacaccaactaggaataatttaaataaaatttataatccaattgatgatttaaaattacttggtcaattatttaatatagataaaaaaaagactgagactactaaaatcatttcaccaccaaagatttcaccaccaaagatttcaccaccaaagatttcaccacttaaggtttcaccacctaaaattgtatcaccgaaagtcatcactaatataccaagttttgttaataaagatgtaactaaatttgctagaaattattcaagtagttttaatgataaattatcatctgatattgatattgaatcatcagaaatatctatggttattgatgatacattaccaataactcaatcacaatcacaatcacaatcacaatcacaatcacaatcacaatcacaatcacaatcacaatcacaatcacaatcacaatcacaacaaatacccgaatataatgaacctgaatatgaatatgaagaagaggagatagatactacatttgaaaaaactgtaaatacatcgaatttagcattacctgaagcaataatacgagatagatcaggtatttatggagtttccgatgaggaagaagatgaagatgaagacgaagaggaagacatacccagtgagattagtgattatgaaatggatattgatattgatccagtaccaataccatcaattgacaactcctttactatccaaccaataaaaccaccatcaaaaccaccacaatttaataatttaacaataaagaaattatttacatcattacaaattaaagaaaataatatacccttagaattatttaatgaattaactaataaatttattgatatggaaataatgggaagtatagaaacatcagaaaatttaggatttggtaatagattaatgattgatacagataatattgataatattttcttagaagctataaatgaatgtgatttagaaattgtacgtgatttagagagtttattatattctaataaatcaatacgtcgtagtaagagtaaagttaataaaccaatgaataaggaattatctataagtattggaattgaagcagatagtgattctgatgaatcaattgattataggataccattagaggaagaagagagtgatgtaagtgtatattagatagatatatagatattacgtaacaaatcaagaaattggacgttcaatgtcaatgtcatgtcatgtcatgtttatgttctttctttacggacaatgacagattatagtaatttattaccagtatccacacaatggaaacaatccataactgatttccttacagaggatattccatcatttgattatggaggatttgtagttggtggtgaaattaagaatgcatcaatttatatgaaatcaagtggaattatttgtggtataccatttattgaagaagttttcaaacaatgtgaaattaatattaaatggcatcataaagagggtgaatatattaaaattaacaaaggtgaaaagaaatgtattggttcaattactggtaaatcaaagaatattttacaagctgagagagtttcacttaatttattatcaagattatcaggtattgcaagtaaaagtaatgaaataattactaaggcaagagaagttggatatagggggattattgcaggtactagaaagacaacacctggattaagaattatggaaaaatatgcaatgttagttggaggttgtgatatgcatagatttgatttatcaagtatgattatgttaaaggataatcatatttggtcaacaggatcaattacaaatgctataaataatgcaaggaaagttggaggattttcaattaaaattgaaattgaagttagaaatttaaatgaagcaattgaagcaattaatgcaggtggtgatataattatgttagataatttccaatcaaatgaattaccaattgttgctaaaaatttaaaggaaatgtttaaagataagaatgacaaacaatttttacttgaatgtagtggtggattaacaattgataatattggtgattatttatgtaatgatattgatatttattcaacaagtagtattcatcaaggtacaccaattgttgattatagtttaaaaattgataaatagaatatatagtactataaaattaacctcttttattttggtaattgttcttgttttgcttgttgttccttttgcttttgctttgcaacaacataaactaaaccagctgagaaacctaagaaaattgatgaaattgaaaagaaattaattggagcatcaaagaagattaaacctgataatgcaattggtaatttatttaatgcaccaaccattgaataagtagttgaagatgtaactctaatacaccaacctgaacaataagaaataccaacagaagttgcacctgaaataatcattgctaaccaaacacttaatcttgcctcaggtgggaaattaaggttaatattttcagttgaccaatcttctaataaaagtgaagcaactaataaaattggaattgataataaattattataatacattgtatcaaaatctttaaaattagttaatttaattctttttctcatgaaaagaacaaatgaagcagaggagaaacaatttaatgccatccaaaaataaccaatattaaaattagatgtaccagtagttgaatcaacatcaccataagttgcaacaactgatgagaaaaccattaaaataaatgaagataatgccattgatgtaacttcaccaccaaaccataaaacttcaccataagcaattaaaataattgttaaatttttaaaaattgtataaattggaattgataaaaattttaatgcttttgatgaagtataaatcattaaaactaaaaggaaagcaattggtgaccattttttcgcttcattaatattaaattgtctataagttataacaccgaaaaattttaaagttgcaattgcaattatacaaacaattgattgaattgctaaaaggaagaaattcaagttaaaatgatgaccagagacaacatatttattagttgttgtcattaaaattgaggaagcacaataacataaaattgagacaggaccagaattaactaatttagctaattgagaaggttgatgagatgaaacaattggagtttcatttacgacagactctttcttttcacttgacatggttgttaaagagagagagagagtatgataaaagagaaataatcaaaaacagcaaagaagaaacaacacacaaacaactgcaataaaataaaatgaaaacaaatcagttgctgcttaatagaaataatgaaaaaaagcagagaaaatggacaacgcgaaattattaggaattttatagcgtgtatagaggtttattattattattattattagttagttagttaatgaaaatttaataaattggtaatctatataatatatataaatatatataaactatgctaatggttttggttcaatatcatcctttgaatgatccttttctttaccataagtttgataatctaaataaccaatatttgaaccaatcttatagaaagttgttctatcataaggagttagttctaaaccattctttaatctattagctaaatcaggattggaagtgaaataacgaccaacagcaattaatgtattatcagttttattaattatttccggtaatttactaatatttgcagcatctaaataaccaccagctctaattaaattacctttccaaattaatgcaggccatgaaaaatcaactgctgtattatcaaaattatctgaagtacctgaaactcttggttcaacaattgaaatataagctaatctattaccctttttagctctattttctaattcacttaaaacgtaaccccaagtaacaattggattaatttcagatttaatacctaaagcaccttgaacttctgcataaggagataatctaattgcaactttatcagcaccaacagcttcaataactgcatcaacaacttctaacataaatctagctctattttcaattgaaccaccatatttatcagttctcttatttgatgaagcttgtaaaaattgatctaataaatacatatgagcaccatgaatttcaattaaatcaaaacctgcttcattaatacatctctttgcacaagcaacatattctttaatcattgattcaatttcttcaattgttaattctcttaattcattttcagcttcaattgcagcttttttagaatcttcatcaaaataaattgcagatggtgcaacaaatggtaaattatgtttttttaaacattttggatcagcagttctacctaaattccataattgaacagcaattttagaacctttttcatgaactgaatcaacaatttttttaaaagctttaacttgttgatcagttttaatcattggacctctttcatataaaccaaattcaggagctgggaaagttgcttcaacaattaataaaccaccattattttcagcacgtgcagtataatattgtaacattgaatcagttgcaacaaaatcagttgtatttctaaatcttgtagttggagcataaactaaacgattctttaattcaacattaccaagtttaattggtttaaataaatttgaagttgctaattcagtaggaggaacggatgccattgtatattatttgtcttttgatttgtcttttgatttgtcttttgatttagaatttaatttaaaattagaattagaattagaatttgataatttcttttcttttttcttatcctttaattctttggtgatataataaatacaagaataaataacagaggccattaaattttttcgaaaaaggtggaaagttgtaccactttaaaagaaatcagaatagaattgtaactttaaaagaaacaaatagaaacacttagaaactgtaaattgtaattaataataattcctaaataggtagcttattactaatgagaaaaatgtcaacaaaacatttttacaatataatgcctattatcaattatcaattatcaatcctacttactactacatatttatcacgctaaaaaacgcgatttttttttatttcctgaacaacatctttgggacattccgcactaacaaatgtagctctttttcttatctggcctctagttatcgagttatagccctttgaagtcaattttttcgatttttcaaacgttcatatctttttctttatgggtgattgaaacacgcccaatggatcattagatttgtagttctctgaatttcacttagtaatttacttgggattatcggagctttcctccgtccttgagatacaattttagtttttttgactttttgcgaatttttgactactttcaacaagctctagctctttcaaacaccctcccaggtatacttttgaaaaattctgtgtgtagctcgtattaatatcttcccaatgacactatttttagtttttcaaaaaagggtaaagtacatttaatatccatttttcagtgaattttggacgttttttttagaaatttttcaagctagcttttttgttactttttattaacaacttttaatgttcaaaaactcattttgttaatttgtttttgaattattatttgatgtaaattatagtgaaaaatgttttttcaaaaaaatgttacaattcaatgtgttcaaattttgttctttttttttggcaaaaaaaattaaaatggaaataacttttttttgaaagcctaactaaaaaacaatatttgatattttgtagagaaaactttgctctttcatatggtactattaacacctgatttagaagagataggaaagggtagtacattaaattaacgctgattttaacgcttttcaaatagttatagtgatagttgattacgtaaacgcgtatctaaaattcatgtatccattttttcatgttacaaatttatttcagtgtctatagatttaatggattctttacggtttacatactcaaaggttattattagcttgttatcaaaaataaaatatgtagtagtaagtaggggtcaaaatttcccgaagggaaattgaaattaccaaacccaacgcattaagcgtcagtttcccctttaggggaaatgacaaaagagtcgattaggttcgtcacgcggaaactagttatcaattattaattgttatgtcaattactcgaagaagtttattattactattacaattattacaattattacaattatgacagatatattataagtagggattataatgtaaaagtacaggaaaaattatgtaatcatttcagaacaggttagacataaaataacaattaacagaacggaataagattttatgctatgataaggtaaagtcataatatatcagatgactataaataagaggacatatccctaattatacttttatatattacattatataagttagttcatttactaaccaaaactatatcaagttatgtattgtgtgtaagatattatacgaagtatataggtttattgttattattgtctataggttaagacagttgttatgaaacctattaagagaaattcaataatcatacacttgataaaactgtaggaaatgatggattcattgtaataacacctacacctacagctaatgaaaccaaatcttctaatgttaagaatcgtccaatgaaaattatgcaatgtgatggagaagacaattctaatgatgattttatatcaaatacatctcctataatcactgatagggaattacaaattcttcttgatgttgaaagaaatgaaatggaaacctgaaatattatgaataacgagaatgttgatgaagatgtggatgcatttactgaaattgagttacgtttactcaatccaagtcttcatgaattagctattcattttaaaaagtactatgatcagatcatttctcattttaattcatttcaagatgaaaggaagtcattggttttaacatttcatcattatatgagaagttaaagatcaattctggttaccttattcttgaacttggttattttaaagaagtatttaaaactttttcaaatccaaattatttgaaaactgctatgtatatagtagattatatgtagaaggaatatctgaagattttaagacaattctgagggaggaattagcaaagaaaaatccagttaaagaataattaggatcgattttatattgtagatactgttattaattatattatattatatactaaactatacaatcatttcactgatagctgtccaccgcaacgtctcatatataaagatacaattacaaaaaatgaaaataaatgtaagaacttgatcttatacacggtacgcctagagtgtgattgcatatacgtaaatattatactatatttaatttggaacagacatagtaatttcaacatcaacacctggttcaatagttaaagcagtaatatttttaactaatgaagatggagcttctaaatcaacatatcttttatgaattctcatttcataatgttcccaagttttagaaccttcaccatttggagtttttctagttgcaattgataatgctttagttggcattctaactggacctttctttgcaacattaaatttaactgcatttctaataattgatgatgaaactttttctaatgctttaacattagttgaagttaaagtaattctaattttagaaatttgttgtggttgttcaatatctttcttttcttcagacatagttatttgttaagagacgttgtcaagttggtaaaggaaataaagaaataataagaaactatctaagatactaatactaatactaatactaatactaataatattaagtaagtgaaaaatttcaaaattttattttattcgcgtctatttattattaaagaaaagagggttggctaaccctcgtatacatcacgtgtgcattacgtaatattagacatttatctatctatctagttatctatctagttatctatttaaaacactgtaccatcacctaataattcaattggtggacctccattacttcttaatttactggcaattaatctgcctgatttccaactacctgcctcaattaattgtggtaatgataattcatatttactacctttaatacccattttttcattaataattggtaataagtaatctaataaattaattgtaattgatctccattcaataattacatcatcatcaggtttaaatactggtatattatttaatcctaatatttgattacctaatttaataccattttgattatgttcattatcctttaaagaaattacattaaaatcaataaataatcctccattacgatattctggtaatcctgtcatatattgactattaagaattttaaatttaccaaattcaattaatggtttaaataatgaatatgttaaccattgtgttaatttatgaaatgtaacaattttatcatttttattctttaatggccatgcatctccaataagataattatcaatcttagtacgaccttcacttggccaaattggtattaataatttcattaatacatcccataaaatttcaatttcaatattcttaccctcatcacaatgtaaattaagataatcaactaaatcacctggtctattagatttgaaaatttcatcatcattaactaatgtttcacctaatttatttaataattttaatctaccttcaaatccattaataggattcatttcactaatttgtaatccatcacttaattcctttcctgttaatttacttaatttattaccatcaactctatatttatcatcaccattttcattatttgaaaaaactccattaataaacatatggaaagttgcaattgcaataccttcagatctattaaataacaatccactctctttttcaatatatttccaattattacctgcacctgcatctaaaagtacactaataacaaataaatcaattaattttttacaaatttcttcatcatttaatcccatttttttcttaaattcattattaattaaatcaggtaatctattttcattacctttattaaaatgttgaaatctaccatgaattggaattgttaataaagagtcatttgttgggtaagttgatttaattgtttcaataacaaaattaacaacattatcaatattatttaaattaacattaaaattaattaatttattatttttaattaattcaagtgttgataaatttgtctctctaactgatttaatactatataagtatttaatttcctctggtattgtcattgtcctatgaagaacataactttttgttgaaaaggatacttatcagttttatttataggaggatttactgataagacggagttatacggttatcgacgggggtgtcggaaaatgtgagcggttttagattttaactttaaatttccgaagagatacatgaatttttccagtttctctgagagagaggttcttactttgtggaattgatcttagacaatgataagaaataccatacgatatagttctaatgttagagatttaactaaaacagtaccattgagattattaggatttcctaaaaaattagacatagaaagattaaataaattaaataaaaataaaagtcaaataattactaattatcaattaagtaatgaagataggaataaaataattgattttttaaatgaaactattagtgaatatccattaaatataatattgagtaataaaaataatgttttcgggtttagtgttaaagaaatggatgatgaatttaggaaaataaataggtatggagatataaatagtgatgttaatgaaattgaaaaaataattgattataaagtaattgatgaagaattaaatccaatgttgtttaatatatttaaagattattataatgttattaatttagacaaaaaaattgaagatggtatagagataaaatatcgtaaaattatgattatttcaataactgaaaaatttatgaataataataaagaatttttaaaatcattaaaggaaaaatattccaatattaaaataaatgcatgtatccttaatccacatattttcccatttttgaaaaatattaataaagtaaagaaagatatatcaagtgaaaatttatataatattgcaagatatggattagttaaagttaatcaacataataatggaagtttaatacttacaaagaaatgagtatatagatttattgaccgttaatatatttagctatatcctcagcaacactacttgaagcagttttagcatttgattcaaaagcttgttgatatctatcacgtatacttttagcaacatcatttgaattttcattatctcttaattcaccatttctatcctcagggaaagtatattctctttctgaagattctaaatctattaaaccatgttcataaccatttttttcatcattttcaatttcttcctcaatatcagatattacctctacattatcattattatcattgctttctttctttttatctttaatacctaaatctttcattaaattattaagttgattatcctttttaattttttccttttctttcttttcatttataattctttccctttccttttgataaaattcattatattcatcaacttttttatcaacaatttccataaattcatcaaatccattaccattataagatgaaacaccaacaatatctaaagttgaataaaattcttctaacattaaactcattgaattaattaaacttgccatataacctgaaccatttgaagtttcatcatttaattcactattatctcttaaactatcttggaaattttcaaaatctttcatccaatttttagcaaaattttcatttcttaaatcatttttattgaaaactataatcattggtaatttagttttatataaaattgaacaagcataaagcatatttgacataaaagttgttggatttgaacatcttggagtatcaattatataagctaaaatagttgggaattcagttgcaaaactttcagttataattgaacctgaagcactccaaataaaacattcaatttgaccaggagtatcaattatacaattattaaaattttcactcctatttttaacaattgataaaactttatcaatttttgtactaaataaatttaatgaagtaacaattgcaccatttggacctaaattataattttccattacttttttataattaattgaatctcttatatcaatattacaattaaaaggaattttataaactgctggatctaaatttattacatatggaggtttattattttcatgtaaataagaatttaatctttgcataaaagtagttttaccagaaccggccattccaatacatataatagttgcaggcatattgattgtgagattgattgtttgatgatttatgtctttaatataagtattcttttctttactgattactaagtatatactgaaaatttacatgttaattaaaataaaaatagaaaagaaaaatttaatctcggaaaattagaaaaattataaaaaccttaaacctaaaattccgacataaacaccgacgcgtctatacaaaaacaaaatcacgtgaccagataaacccgatatatccgaaacccgacaaaatgcattacgtaatcaaacaattaattaaataattgattacataagcaaaagaaaaaataaaataatgacatggtagaaatacagcttaatattggtattaagagttgaaattttataatagaatacaatactggacaataaacatggataattcactgcatatacctgtacagatgtactatcaacaacaagatttcattaatgatccaacatctcatataaattcattaaataataataataataataataatattcaaaataatagtattcaaaataccattcaaaatataaacaataatatagataataagcaaactgatagtatagaatcaaatcataataatatacaatcacaatcagataatattattaataaccaaaataatcaaaataatgattcatataatcaacaaatagaacatagtttagatgaagaaattataacggaaaataatgattctaataattcacaatcacaattacaatcacaaactcaaacaacaactccatcatatcaaccttattatgttaatgcaaaacaatatcatagaatacttaaaagacgtatagctagggcaaaattagaggaaaatttgaaaattcaaagagttaggaaaccttatttacatgaatcaagacataaacatgcaatgagaagaccaagaggtcaaggtggtagatttttaactgctgctgaaattgctgaattagagaaaaaagaagcagaaggggaggaagatgaacaaaatgaaattaaaaatgataatatagttattaaacaagaaattaaagatgataaagatgataatactactaatactactaacaataatatattgaatatatagctggactaaattactatataatatataaaatatacttctattaaatcattgaattaattatttccttacattgaggatctaattgattaattaattcattaagataattattattaattttcgttaaatttaatttaaaaaattcaattaacatatttttattatttataattttattcaatggatcaaatgatttaatttgaattattgttaatttattaaaatttgaattaaataatgaaatttcttcattttcaatctcttttagaatttcatcattttcattaatattcttataatttaaaattgattcactatttaataattttaaaatttcacttaaaatttttaaaatttctaaatcattaattttaaaattatttgggaatatagaattataactattattattaacaatcatattagttaatccaacaactaataatttcttatcagttaaattattaatcttattaatattaattataataaaattatttaaaatttgttcaaataatccaatttgaatattctcaaaaattttaataatcatatcactattccatttattcttattataatcaattccatcactattactacttcctatactctctaaacttgacattttacttaaaaatataattaatcttttaataaatttatcagttttaaaatttttcaatcttgttaataaaataatgaaaatttcatttaaatatttatttaaatattgaatatcaatgaaaattaaaattgtctctaaaatttcaaatcctaaatgatcattaacttttgaacttaataatttttgataaatacctaaaattggtgtaatattttcatcattattaaataaatttggtttaaatttaattattgaacttaataatctttgaattgcaggtatattacctttaaattcccaaacttgtggtgaacataatggtttaattaattgttcatattcaattggaatttcaacattttgaggatatttctctaaaatatatgataaaatttgaaatgaatatggtataaattcttgaatatcttgtcctaatatattaaataatgaatttttcaaaatttcataaaattgtattatattttgattattattctttaatataatacaaatacattcaaatgtataatgagaaaattttggatttgaaggatttttagaaataatttcaattatcttaattaactcatttaaaatttgtaaaattgaattattatctaataaatcttcacttataattaaaattctcataatacatttcattaaaaattcattctctgataatttttcaggtgttaaacccattttaaaaattaatttaaataattcaattaataaattattaataatttcagttgataaatcatttttattaaataacatttcatcatttttattaggatttcttaatgataaaattttttcaattgtaattgatgtgaaagtattaactgtataatttaaattattaaaattatttgttaataatggtaaagtttctaataattgatttttagttaattgatttctaaaaatatataaatatttaattgaatcaacttttaaaattggattaattgattcattattaattaaatctggataaataaattcattaaaaaatttaattatatcaactaataaattagtgcttgtaataccattagaatttgtaattgaaccatttgatgcaattgaacaaaataaataaattgaaatatctttaaatttccaattattaattttatcattattatataatgataaatattgattaatataattcattaccatattagtaattaaattttcatttaattcctttaatgattttaaaaattcagttgcacttcttctacgattattaatatctgaaccttctaaatctcttcttgtatattcaattggatcatcttcaaataattctaaatcactttctctaattgtaatatttggtaaaataattttttcaataatttgtttaatattatcttcattattaataaataaattattataggatgataaattaacaatacttatcataaattgtaataatttagaaactaataaatcattctttggttgaattgttatattattaagtaaattccaaataatttcaattgaaggttcaataaatttatgaaattcttcttcatatcttgttgtatataattgaattaattcaactatattaattttaacttgaataactaaattagtttcatcatcttcatcatcatcttctaataatttattatgaaatttcaaatattttaataatatattaataccagtattcatattatcttcgaaaaattcaggtatatcttgacaatttaaatcataataaattttaactaataaatttaaattttcaaataaaatttttaaattatcaatattatttaaattttcatcaattaatttatcaatattttgtaacatactcataaatggtatagaaaatttatctaaaaccattttaatctctaaaaataattcatcacttctaaataatggtctccatcttttaaaaattgaatgtgcaacttttaaaacacctttattaataattaaatcatccattgataatttttcaactaattcatcaattaatgttgaccataattgtgggaattcactctcagctataagactaattgattcaccaatttgtaattgtaatgaatctggtaatataatcattaatgaaataatttcctttttaatcatttcaacatcattaatactaattaaatattgcccattttcattaatccatttacgtttaattaaattcttgaaatataatgcacctgccaatctagttgaattggcaatttctccattggcaactatatgtaacaatgtgattgggaaaccttcctctgtttccattgctttgagaacattctccgcctgtttggcagtagcaggttgcagggactgttcaagtataggcacaaccttctccattgtcgatgtgaaacaaagcaaaggaaatccaaaagaaaaagaagaagaagtacctgaaactgaaaaaacatgtctgaaaattttaaatttatcctcactataaatattgtgatgagtctcttttactttactttactttatttaattgtacacatggttacacatctctaccagtcatcgtcatcgtcctcttcgtcgtcactctctctgcgggcgtgttgcctgatggctgccgccaaatcactggccatagtggtttcctcctgtttcttctctaacagtgctgctgcaagtccattggcaatattgttattattattattattaacagcagcaggggtacttgatgcaacacttgcagaaggaacactaacattatcaacagcaacaatataagcagttggaacccatccctctttactctcatctaatgtctttgctaatgaccatccacttggttcactttgtaaaatgtaaataatatctcccttagttaatggcattgatccattcgttcccgcataatcatattcagctctatatgttggatattttggtttatttgcaggtggaggtggtggaggtggtggagtaggagttggagttggtgtttgaacttgttgtgcatgaactgatgttggaacaggttgtctatttctactaattggtgcaacaggttttggttttgctgctactgatgataatttaggtttattagatgcaggtggtggtgcaggtattgattgcttaactgtatttcttgattgattcattacaggtgacgatttaacataacctccgccacttctattttgaatacttctcttatatgcagcaattttttcacctgtaaatgcagttttactttgtggaacagctttatttcttgatgttggatcattaccttgtccaactgaaactgtacttgatttatatgtatcaccattcttattaatatctggtgttattttaaatttaactgtatgtttcttaccaggttttttacaataaacaatacttgaatcaatattaactttaatatttgaattaatttttttaaatcttgttaaaatttcagttttaaaaatacaattaataaataaatcaggttctgttttagaatttaaattaattgcaatccaatcatctgctaaattactaactgaaacttgtggaattgataaaattgatttattaaattcaattgtatattttgccttattattaacaacactttgtccaataactaaaaatttattatccttggtaattaagaaaatttttgggaatttttgtgatgatctaccaaatttactatgtaattgttcaccctttccagaaaattgaactttttcctttaatccaattgaattcattaaaaatttaccaaaacctccagttctatcattacaacctaaataatcaccataaaatgatcttgaacctaataaacttaatcttcttctttgctttttaccataaactattttattaccaaaatctcttaattcaatatattgattactttcactaatacctttagttctaattttccataatctttgaataattctagctgcatcctctcttcttttaagccattttctacatgctctttgaataacttttgccttatttgcccaataattttctcttaaatcttctaatgcaaataaagtttcaggttttttaatgaaaactttactaacacctaattgccattcatttgaatcaaatttactatcatttaaaataatttcaacagcagttttagcatccccattccaaatatattcaccagcatatgatgtctttgttgataaaagataaaatctttcaacaaatttttcaaatgtttgtctataagcaaaacctgctcttctaattctaacattttcctttaaacctaaatatttaacttggtgtaaaactgcctttgtatcatattcagttggtgatctattttgatttggtttaatagttctaatatatgaaggagttgcctgtgataatgtatcaactaataaattagcacttgttttaattttatcaccagcacttggaggtcttcttttatttgattcatcaattttttcaggaaataatgaagttaaaaatgtatcttgagatgattgtaataattctaataaatcttttaacatttgatctttatttttatcagtcattgaattaatatcataagtaacatcacctgcataatgtttaacaataaatttattacctctaagatcaaaatgtttatttgaatttaacatatttaatctttgagcaaatgattgatctgcagctgaagaatctgcatgagcagttgcacatgcatcatttaatgcagcaaaaattccaggaggtctctttgattcaattaaatcacaaacaatttgattattgaaaaaatcaattggagtccatttaatttgttctttaatatattcatcttgttcagattttaaagttaattgaatgaaaatttgttgtaatttttcattaacataattaatacataattgttcaaaagaattatgttcaaaaatttcaaatccataaatatctaaaataccaattgattttaaaccatcattaccaatattagcaaaagattgattaactctatcaacaatccaatcaaataaattattataaatacccattgctaaagcatctttaactgcagttgcttgagttatatttaatggaacatgataaattgaacctcttttcataccatgagaagtttccattgttctttcagttaatgaagtagttaaaatttcaggattaacttgtaaaaggtaagcaataaaattaataactgacatatcagcaatttcagaattaccatcttcatcttctttaaatgtaacattaccaatccataaaattgcagataataatttgaaaacattatccttttcatcctttgataaaccaattgtatccattgcttttaaagtttcattaaaatcaaataaatcatcaattgaatcaacagatgtacaaccagatgatgcagtataaatatattgttcaggtttttgaacaccgaaaatttgtctataattttcatcagctgctttagttaattgataaaaaatatggaaatttctttcatttttaatttgaccaacaactctttgcttttctaataaataattagtaatattagcagatactggttcaaaacttttattaaatttaatttctaaatatttaccatgtcttgaagaattattatttcttaaagttttagcacaaccaaaagattctaataaaggattagttgctaaaaccatatctttaattttttgaattgatgaagaattagttaaagaacctgaaacttcagcaatatattgcataattctctttgcagcttcagttttacctgcacctgattcacctgaaataataacacattgattatcattataagcaatcatattatgatacatattttcagcaattgcataaacatgaggaggtacctctaatctatttttatttttataagacattaaaacatctaaagtataaatacctaaatctttgaaagggttaacagaaattaaaacatgaccaatataagtataaataattgcattttcaaatcttttctgtaaattattattaattgattcatcagaaattgttgaaagtaaagttaaatcagatacaccaacttctttcttctttgtatgttcataagttgcctttttaattgcatttgaatttgaattagaggagggaaaagaagatgaatttgatttctttaccggtacagcagttttctgacgtgatcttttattgaatcccatcattttgatatgaaatggagagcaattgccttagagagtagaggaaatgttaaagaaaagacggtaacaaaaggaaggcaaaacagagcctccatagtataattataattaattaataattgaaaaggggcaactttcaatgaggtcgatgcgtctactgttattttattttgttaagccttcttttattattatcatgaattgatttgatttgatcatcaaaagttaacaacttatttaactttatatattctttctttccatttcacaaacacaatgtttgaattagatttcgataaatatttttcagtacaaatatttttcatcattcttagagagactattgaaagtgccattattgtttcagttttattatcttttattaatcaaaattcttatgatggagttaccggtcaattacttattgataaaacaatttataaaaaaatgaaaatgcaagtttggtttggtgcatttacaggttttggtatttgtttattaattggtggtattttcgttacattattttatataattggtacagatctttggagttatactgaacgtatttgggaaggtattttttcaattttaagtagtttaattattgcaattatgggattttcattattaagaatcaatgcaatgaaaaataaatggactgctaatttattagaaagttttaaatctcatagtcattcctcaacaaatactgaatcagatcaattaattgaatcattagagaaacaaagtttaaaggaaaaatattttttagcatttttaccatttataacaactttaagagaaggattagaggcagttgttttcattggaggtattggagttaatcaaccaattagttcattcccattagctataattatgggatcattaattggattttcaattggttatataatttataaaggtggtaataaaatgtcaattcaatatttcctaattatttcaacatgtttcctttatttagttgcagcaggtttaattagtagaggtatttggtttttagaattagaacaatttgttcaaagatgtggaggtcaagatacaagtgaaagtggttcaggtcctggtagttatgatattaataatacaatttggcatgttaattgttgtaatggattaaaggatggtggatggatgatttttaatgcccttttaggttggaataatactgcaacttatggatcaattatttcttatgtgatattttggattagtattatattaatacttaaatgtaaatcattaattgaaaatgatggatatattaaatatttaccaattaaatatcaattaaaatatgttaaaaagagggttaaaatagcaaagttattaattgatgaaatagaagaaaatagtatataatcgtatatataaaaccctttataattataatttataataatgcattgaaaatgacagaaccagtaagacaagtaatcaattcatcattataattataagctctagcagttacaacatatttaccaggtggtacttcaccaggaatttccacctctttggttaattcataattacctttcttaattggacatttcatatcaatattaggtaattcctcacataaatcataagtttgagaaattaattttatataaccaaatgtaactacaacatcaacataggcaccatcaattatatcatctgatatataaccctttgctgtaattgttaaattggtacctctctctggtggattaggggaaaggtctaattgttgtaaatctaaaatttgattataagatacatcacattgttccaatggtgaatctccaggaactggtttattaccagggaatagtgcagatatagcagatacgtattgtacgagtggtattgagaccataatgatactgatactcctataacatgtgataaataatcaaacaaacagaaaaacatgtaattattgcctctacaatacaaaacacaccacccggagcgctgggaaaacaatgacccggagaaaatgactttgctcatttttcccacttgctctataaaaggatggggttttccccttgttttctgattcaagtatactacactctctttacacaagagctactttaatagcaaataaccaatcaataaccaatctaataaacaatacaaataaaatgtcaactgtaactaaagtttacgcaagatcaatctatgattcaagaggtaatccaactgttgaagttgaattaacaactgataaaggtattttcagaacaattgtcccatctggtgcatcaactggtgttcatgaagctttagaattaagagatggtgataaatcaaaatggttaggtaaaggtgtccttaaggcagttgctaatgttaatgaaattattgcacctgctgtcttaaaggctaatattccagttactgaacaattaaaattcgatcaattcttaattgatttagatggtactccaaataagggtaaattaggtgcaaatgctatcttaggtgtttcaatggcagttactaaagctgctgcagcttatgaaaatttaccactttatgcttatattagtaaattatcaggttcaaaatctccttatgttttaccagttccatttatgaatgttcttaatggtggttctcatgctggtggttcattagcattccaagaatttatgattgctccaactggtgcttcatccttcagtgaagctttaagaatgggttctgaagtttatcatcatttaaaatctttagcaaaggctaaatatggtcaaagtgctggtaatgttggtgatgaaggtggtgttgcaccagatatttcaactgctcaagaagctttagatttaattgttgaagcaattgaaaaggcaggttatactggtttaattaaaattgcaatggattcagcttcaagtgaatttttcaaaaatggtaaatatgatttagattataaaaatccaaatactgatggttcaaaggcaattactggtcatcaattaggtgatttatatgctgaattagttaaagattatccaattgtttcattagaagatccatttgctgaagatgattgggaaacttggtcaggtaatttcaataaattaccagttcaaattgttgcagatgatttaactgttactaatccattaagaattaaaaaagcaattgaagaaaaggctgcatctggtttattattaaaaattaatcaaattggtactatctctgaatcaattcaagctgcaaaagattctttcaatgcaggttggggtgttatggtttctcatagatctggtgaaactgaagatacttttattgcagatttaactgttggtttaagaactggtgaattaaaatcaggtgcacctgcaagaagtgaaagaatggctaaatataatcaattattaagaattgaagaagaattaggtgattctgcaatttatgctggtaagaatttcagaactgcttctcaaatttaaatttaataattaaaattacttacattacatacatagttctatataatatatactaaactctattaatgatctttctcttataccaatgaataaaatcaagtaaatttgatcttgtctttcttaaattttttgaattaattgaaatttctaaatttttgaaaaatttaactttttcattatcacttataagttcaattggtaatgaatttaagaaaatattaattgaatttaaattatcatcaatttgttgataataattattaatttgaaaaatttcaacaattaattcaattgatgaataaattaaatcttcattaaattttaaaattgaataatttaaaaattttataattaattcattattattttcctttaataaattaaaaattttaaattttaaaatatttggaatttcaaaataaattgaaattggtggattttctaaactccaacttaataaatctgttaaataatttataattaaatttaataattcaaattcattaaatttatcaattaattcaattgaaattttataaataatttcaacaattttaaaattatttaaaaattcaattggtttaaacattaaaatatcatttaacattcgataaaaatcttccaatatatcaacatttaattcattaaaattattttcataaatattaatcaatatttcaatttgatttaatgaaaatgtccaaatattatttaatatatcaggtgttaatttaataaattcatcatcatcaatattatcattaccatcatcactaaattcttttattaaagtacctgaacaccataaataacaaccaaatttaaaatttttaaaaccttcagttaataaattttcaatatctgttaatgatggtaaaataaatcttttaaaattttgtatacatttcctaataaatttaattaatttttcactaattttagataatttaccaaatttattgaaaatattgaaaataattgggaaaatttcatttataataaatgttgaaataatataatttgaatcctttaatttaagaaattcatgtggtggttttaaattatcaatataaattgataaaatatctaatgaattacttatattgattatattattatcattattatcttccaaaagtgaattatttaacttcaatatagtatttttccaaaacatttgaattatattaatacattgatcaccattattaattaaattttccttaataaaatgatttaaaacatatgataaaccttcagttatatcttctaatgatttaatatctaaatgattttcaatatttgaatataaattatataatggttcaagataattaattaataaattattacaatccatacaaaaatattttaatgcatgacttgttgcaataattatttgtaatttttcatcttcattataattataaatttcattatttaatttaaaaccttcaataatataatttaattcaatttgtaaaaattcaggatgttgactagtccaaattgtatatctacctaaaactaatgttgcagcatatctaattttaggattttcaggtaattgaataagataattcattatttgtggtaaaatttcattttcatttttattaatttctttagccattgatctaattgcaaataataaacattcgatttcttgccatttaatggtttcattattagtattttcaattaatgttttcaatttaagaaatggtatattaagtgaatcatattgtccaataactaaacaacaatcttttaaaacatcaccaatttcatatctaaaatctttaaatttatcttcttcctctttattattattaaataaaatacttatattagttgaatttgaaataattggatattttaaatgattaattaaaatttccattaattgttggaaaattggtttaaaaattttctttgattcattgaaatttatttaaaattaacattgattttaattcataccaaaatttaaaagtatatttaacaatatctaaatcatcattataattagttaattttaagataatttcaattaaatcttggaaagaatttggatctttaacaattaatgtatgccacatttcaccagtaattgaaaataattcagtaaatctttcaattatcattggatcatcccaattttcaataattaaaggtttaaataaaattaattgttgataaattatattaataaattgtaaattattttgtaaattatcaaatatatcaatttgattaattatagttataagacaatcaattgaagtatcaaaagtttcatcattattaaaaccatttataattaataaccaaattgaattattttcattattaagtaataaattaattggaatttcattaatccaagatttaatacagtttaaaataagaattttaatattatcatccttaatatcatttgatgatgcatattgtgataaaatgaaataaatattttgagaatttgaagttaatttattaaattgaatatcatattcatcagaattaagtggtaatttagttggatcatttaattcctctggtaaaattttcaaaaattccaataaattgagtaaattatttgataatttatttaaaatttcattaattggatcaatccaattaagatcttgaattgttaaataagataaagcgattgataattgaataattaataatttatcattattataattatttaaagaattaagataatttaagattaaatttcttaataaaggtattgaagaatcaggtaattgaccaaaatcatattgagtctttgatttaagtgtttgacaaataaataattttaattcctgagaatattgttcattatttggtgttaaaattgagaaaataacatcccaagaatttaatgatttttgaaattccaaaagaaaattatttgcatcatttttaagttgaggagtggtattaccatataatgttgataatgctttatctaattctacagttatttccattagtttaaggttattctaaaagaaaagttgtagtgtaattgatgataaattttacaccctcaatggcgacatgaaaatttcaaattctgtatgtcttattttctttttatttatatatatacgaccactatggctaaaagagtaagtaatacaccaccaattaatcaaatatttcaatatttacaaaatcaaaataatgttaatatatggttatatcaacaaaataaatttaaaattacaggtataattaaaggatttgatgaatttatgaatttaacaattgaaaatgccaaagaagttagtttaaaggatccattaaaggagagagtattaggtatgattatgattaaaggagataatatatcacttatatcatgtgtgtcgtaggggagaggggtattaggaaatgtgacgagtcataaaaatggctggttgatattatattatggtatatatagtgagtaatatatgtcttttttttaaggatatagtctgttttataaactctttttagatgattgtataagtaatgagaataaattggataatatatatgataattggagttgaatgtattaaaagtattgatgatgggaataataagataatggaattagttaaggaagaagacagggttaataaggtaatagataatataattaataatgattgtatgattaaagtaatgaataaatattattatagatatgaaattgaagagagagaaaaatggagatattgaagaaataattaatttacaaggtagggatgtattaattaagataatttcaattgaattaactaaatgtttatttgagaataataagagagtaagattaagtgaagtatgttatgaaaatacggggtgggaagtaaataggatagaaaaatgtattgaagaaattagtttaaataataatatgtggacaacatttaatggatatttagttaatattgataatttaatgaataataggataaataagattgaaaatttacaaataattgaagaatataagaatatgatacaatatatgaataaatatttacaggatattatacgaatggatagtgatagggaaggtagagaggaagagatgataaatgaagtaagagaagttaaagaggttttggatgaaatgaataataggataaatgaggttaatgaaattaataaaagattacgtaatgagatagtgttacgtaataataacttatggcttacgtaagtgtgcggttattattttttatattattacttgcggcttaatctttatccagtgtggtaatttaattttgatcaattttcctctccatcctatgcggctttctattgtgtggttatataattaaacagttttctcaatgagatggatagaagagatgcttctctaatggatatatctcttcttttatcagtttcataagtatgagttactatactcctactaacccgacaaataatcagtatataccatatccctatccatcacctattccaactcctataaattataataataataatattaataataataataattataataattataataataatattaacaatactggttattattacaactatacctataataatgttcaattaaataccaataataatactaatcctaatactactaataattacaatcaatatccaatatactatactaatcctatacaattaccaatacatccattaattcaaccaaaatttataccaaaaagaataattactccaccaattgctaccactagtactacaaacactatacaagagaaagagaaggaaatataatgaaattaaaagactttataaatgtaattatcaaaattgtaataaaagttatggtacattaaaccatctaaatttccatattcaattacaaaatcatggattaaagagaaatccaatagaatttaaacatttaaagaaagataaatgaacaaaaataaaaacgttatcaacgtttattatatattattatgcatgtaacatcgggatttagctattagcacctcggttattgccgattagatcttagaaactattttccaattaccggcattagaccccaatgcggctttattttttatttcttttatatttaatttctttttatttcttttatttaatcacgtgtatgcggcttatataataataatatttactatactatactaaattattctagaatcatcatatacccatttcttttaaccaaatgttcaaaaagagaagttttaaatcatcaaataggaatacctaacttagatattatagataatgataatgataatatagaagacacagatatagatataaaatttaaaagacaatcaacaatttcatttaagaaaaaactcaaatcatcaccaccaccaccatctacacaacctacacacgacacaccttacataaatcaattcgatgatatagaattagaaactcccataaccaaccaccccattataccaaatacattatcagttcatagattaactcctccctttcttaataaagagaaaattttatcttcaaataatttatcaattaattataattataattatattaaggataaatctggtgatttatttaaattttcccatttaggttcaaatttattaaaagattatcgtaatttattagaatttaaattatctaatgatttattacctaatgataatatcccatctaatgataattattcaataaaacaatccccataaatgagcctattaataataataaaaacctacccgcttataaagttaaagatcaattacttaaaataattgatgaaaatcaagtaattatcatcattggtgaaacaggttctggtaaaacaactcaattacctcaaattctctataattcaggttattccaaaaatggtaaaattggtataactcaacctcgtagaatggctgcaatttcaattgcaaatagagtttcaaatgaaatgggcgttaaattaggtaatgaagttggttattcaattagatttaatgatttaacttcaccacttacgaaaataaaatttatgactgatggaatcttattaagagaaactttattggataatttattatctaattattcttgtattatcattgatgaagctcatgaaagatctttaaatactgatatccttttggggattttcaaaaatttattatcaaagagaagagattttaaattaattataacttctgcaacaatgaattctttaaaatttctcaaaatttttcaataatgcaattcaatttaaaatacctggtaaaacttacccagttgaaataatgtatcaatcatgtaccaactgttgattatatagattcagctataaagcaagctttaaaaattcatatttcaactcctcatactcctaatgataattctgatatcttaatatttatgacaggtcaagaagatattgatatttcatgtcaattattatcaattgaattaaaaaaattacaaaaaattaatgataaaataattgatttacaaatattaccagtttattcaacaatgtctaattcattacaatcgaaaatttttcaaaattcccccattaggaaatgtataattgcaacaaatattgctgaaacttcacttactcttaatcatattaaatttgtaattgattcaggtttaatgaaattaaaaatttataatccaaaattaaatattgattcattacaattagtaccaatttcaaaagctcaagcaattcaaagatctggtagagcaggtagaatttgtccaggaattgcatttagattatatactttatcatcttatgaaaatgaaatgtttgataatccaatacctgaaattcaaagaagtaatttaatgaatactatattattattgaaaaatttaaatataaataaaatctctaatttcccattcattgatccaccttcaattgaattaattgaaacttctcaatatgaattatggtcaattggtgcattaaataattatggtgaattaactaatttaggtaaagaaatgtgtaaatatccaattgatccaaatttatcaaaattattaattatttccaatcaagaaaatttccaatgttgtgaagaaattttgaaaattatttcaatgttatcagttccatcagttttcataatttctaaaaaaaatattaaattacaagaaaaaattactaaaattagggaaaatttccaaattttcgatagtgatcatttaactttattaaatattttcaatcaatttcaaaatgtaaaagattatgaaagagaaaaatggtgtttaaaaaattattttaattataaatcattaagaaatgcaattgaaattaattctcaattaagacaattagttattaaaaataataaaaatattactacatgttataataattgggaaattataaaagaatgtatttgtgcaagtttctttacaaatgcagctgaatttttcaaacataatcaatataaacatattagaacaggtttagaaatgtttataccaataacttcatcatttaatggattaaatgatttaccaaaatttataattttcaatgatattatattaacaggtacaaagcaacaaatgaattatataactgctgttaaatatgattggttaattaaatatggaaagattttttattcacctaaattaaaaggtattaattcaagagaaaatcaaaaattaaaggaagaagaatttaataaaaatttataaaatttataaatttataaaggtttaaaaatcatattatctattaatctagttgtttcattatttatttcattattggaatttggtacataaacagccattgataaaatacatccaatttttggatcaatatttgttaaataacttaaatctcttggatcattgaatgatatataatcaattttaaatttatcattaatattagtaatataattagatacaatttcagttaatttttcaacattaaattcaccatttaaatattcttcatttgataatttcatacttttatataaacatgtaacttcatttaatatatcattggataaatatttatttcttgaacttaatgctaaaccattttcatttcgaattgttggtacaattttaatatttatatttaaaaataaatctttaactaaatttttaattacaattgtttgttgaatatccttttgtccaaaatatgcatttgttggcataactatattaaataatttagttacaacagttgcaacacctctgaaaaaagttggtcttttcaaaccttctaatggtttactaacacctaaaacttcaacaaatgaacctttttgattattaatatcaaatgtaaatcctgatggatacatttcctctaacacttggtttgaaaattgcatcaactttaccaattgctagtctttttataatttcaatatcatgattaatatctcttggataagtatctaaatcttcatttggtgaaaattgtgatggattaacgaaaattgaaataattgtatgtttattatctttaattgattcattcactaatgataaatgtccttcatgtaaatatcccatagttggaacaaatcccattgattcatggttgaaagattccactaatgaacgtagttccttgactgtggtaatgataggtatctcagacatctccatctcttactcccagagaaagaaccagagtctcattcatagtaagaaagtggaaaatctgaaaaatttcaacgacttgaaaaaacggtcgctttttccaaattttgacgtttttcttatcttatcagtagagtttactggttgcttttatgtttatctactttctttcttttcttttctttctttctttcttttcttttctttgggcaaatgggacagaacgtatccactgacaattgcaataagcatacaattactatccctaatcagggtacattaactggttatactttgaaaaacccttccaatggtaaaccaacatgtcatagattcaccaatattccatatgcattaccaacaaaacaaagattctcattaccttcatcaattcctgatgattatgattatagtaatggtaattatttaaaatttggatcaaaatgtcctcaacctgtttatcaaagtaaacaaattcaatatgcattaagtgatagtactgaacatattcaatatgttaatatttggattccatcatctgatgaatttaaaccaaaaaatggctggcctgtattaatttatattcatggaggttggttacaatatggtgatccaaataatgagtttttcaatactgttgaattaatggatgatgaaaattttaaagacaaatatattttcgttactccaggttatagattaaatattttcggatttttaacttgtgatgaattaattaaggaaaatcctaaaaatactaatatgggtttttgggatcaacgtgaatctattaaatgggtttataagtatattaaatattttggtggtgatccagagaagattacattatctggattaagtgcaggttcatattccgctttctttcaattagcttatgaattatataatcttaatgaagaacaaattattaaacaagttattttcttttcaaatatgatttatagtcaaccaaagactattgatgaatgtaaagaacaatatgatgaagttgttaaaaaattaaatattgaaaatttatcacaatctgaacaattaaaatatttaagatctttagattataaatttttagaagaatttttaccaaaattagaattacatacttttagagcagttactgatgatcatttcatttcatcaaatattttaaaagatattgtttcaggtgaattttctcgtttattgaatgcaaaaggtattagaattatgcatggtgaagttgataatgaatcatatctttattcattattaaatcctccaacatcatttgatgatttacaacttcaagttgagaattattatccaagaaaagtttcatcattgttaatggatatttataatgttaaaaaggaaattgatattaattccaatgataaggatgaaaaatttgctcaattatttggtaaaattgttggtgatggacaagtttatgtttcaactagaggttttattaataatattattaagaatggatttaataaaaatgattattatcgttatagaattagttttagaggtaaatggttagatgaacatttagatccaaaagttaaagttactcatgcatatgataaaccaatttggttttatacattaagagttggatttaataatgaagagaaaaagcaaattgatttatttttaaaaccttatttagaatttattaattttgaaaaagatattaaagattgggaaacttatgatgaaactaaaattagatggtttaaagatgatggtagtattacttatgagaaagatcctgattgggatagaagtattattattgcggaaaaagtttataatattcaattataaaatagattgtatagaatagtattaaaataagtttactttattattattattatattttttgaggtttatcagttggatgaattggaggttcaacaattgttgcatttgcagcttttttattatccattaatctaagtaaatttcttaaaagcattgcaattgtaactttaccaattgaaggtacataaagtgaagcaactttttcaacatcttcatcaataaaattattttcacttgaaaaattgatgacaattgcaccacgtttaatatattcacttgggaatttataagtatttgttggaacaccagttataattatatctgaaattttagcacattcctctaatgatttattacaatttaaaactttatgttgtttatatcttaaaccatcacctctttcatataattgaatatcatttatatcaacagaataaacagttgcaccatcatttgctaataatgaagctaaaggtctaccaacaatttcacttctattaacaattgtaacagttttaccatataatctatcaccaggattaagcattttattataagcaccaatatattctaaaattttaacaactgctaatggagtacaaggtaaaattgatttcattgttttattttcatctaaatatctaatattatgatacatatttgaaatatatttaaaatttaaaccttcaacatctttatgtaatgaaacacattgttgtaaatattgatcttgcttgttaccgaaaactgggaaataaacaatcataccattaatattatcattattattacatttataaatttcttcctctaattgatcttttgaaacttgaattaattcatattggaaacctaaattacttgcagttttaccagtccaagttgcatacatcattgcagctggatcatcatttgctaagagaccaactaattttggtttaattgctaattttgaagttttatcagtaacttcttgaatataagcttttgcaattttagatgcaggtataactttacaagctttagctaatgcggacatgatggtatataagagattgtccaaagaagaagaagtaatataaaacatgaaaacaagtgaaaaatcgaataaataagtaaagaataaaatttttttgacacaataagtactaataataagataagaagggtcagagtcaaaattatgttacctaatcttcttcaattggtagcaagtgctttatcttcttcttcttcttcttcttctttctactgctgctctataatgatgattcacttttaaagatagtgtgttaattgttgcatgtcttgtatctcttagaaagtgctatttgtaatcaaatagcaaggaaaacaaaattttttgaaataactagataatttactatagttttccagctatgttttcattgtttgctattaaaacgacttaaagtaaacgctcaagaacattactatcaatcaatgaacggtgtatatttcatagagtatcatgcatttctgtagatgtcttacattgaagataaacttacgtaatatagaagtatacattgattactatcaattataagtaggaacaccctacgagtattaatgggttatatacctactgcttctgaataaagaccaagtagaccttaataaatcaaatatatcatcaggataagtagatgatcaatcattaaagaaacaatgtaatttgctacctaatagcactgtaaattgaataagatacccaaataggcaattcagaccagacgatttggacatgcagtgatatttcacattataatagtgttgattggatagtttatacagtctttattaggggattcttcctttgtgctaatacaatctgtgatggatactagtaatatcaatcacgattttgccaaattggcaactactgcatcggtattggttaattctgctacatctaatgcaaatattaatgaaatgttacaaaaaaataatgttttccaatcaacttttgattcacagggtaataacaataaacacggagatggtaatggtaaaggacttataggattattagctaaacatgaagataatttacgtattggtagagtattaaagagaagtaattttacaagtgatggcaaaaagaagaaagattttaatattttaacaaatgaaatgcttaatgatatacctgaatcagatcaagatatttcacgtagtaatagtagtggacaagatcaagatgatttcaataggaatgagaatgatgataaaccattttctttatttcaaggatttagtgcaattctaccacaagttgatgaaactataaataatattaaacaaatgtcaggaaaattaatagaagattcaaaataataataaataaataataataataaaagtacaaatagaatcaatggttatagtaaaaatgtaaggaattctaataaaatagatgaaatatcaagtgaaaagattaaatcatgtcaaagtaagaaaatattaaataattttacatcaaatattaattattatttagatttaatggaaattcgtaaaggattaggtaaaagtgaaattaatgaaatagattctaaaattgatagattattcttacgtagaaaggaaattactgatgatattaaatattatgaagaaagggaaattttattagagaatcatcttttagagattaaagaacgtttagagtttattaaagatataagttgaaccagagagtgaagaaagtaatgaaaatattaatgatattaatagtgggaaaaaaattagtaaataaaaatgaaaagataaaagcaaataattctatagataaaacaaataatgataatgaaaaagaataatgaaaagaacaataaagcagatgaagagaatattagtgatgattccagtgatgattatgttacagttaatatggaagataacttcatcaacatcaggatattcaagaattaaacatacaactaaaaatacgaaaacccggtgatcaaatacatcaatttcaagcacataatgaatcaattaattgtattgcatttgatcaaccatataataagatgattacatgttctattgataatactgttagattatggaatttaaataaatataaatgtattggattattagaggggacattatgcatcagttgaatgtgttacaattgataataatttagcatttactggtagtcatgatgcaactattaaactttgggatttagattattttgataataaaaataatagtaccaataatgataattatgaaaatgaaaataaacctttactaaagagttttgaaggtcatatggatacagttacggctataagttatagtaatggagaattagtttcaggatctgaggataaaactataagacaatgggatttgaatactggacatttaattcaaacaatggatataatgtgggcatcatcaatggctaattcaatgataaattttggaaatgattctactactactgctaatataaatcgtaatgataataaatttagaaataatatacaaaataataataataacaaagtatatccatatatttcatcattacaagtatttgatgcagcattagcaacgggtacaaatgatggtattgttagattatgggatttaagaagtggtgaagtaattagacaattatttggacatacaggacctgttacaacaattcaatttgataaaaattttaatttaattacaggatctgcagatagaagtgtacgtatttgggatttaagaagtggtggattaatggattcttatagttatgaaaatcctattaagaaattagtatttgatgattttaaaattgcaagtgtagttgaaaatgaatctggtgttcgtatatatgatagaaccgaacaacgtcattggcaaataggcagtggtgaaagtggtgataccaatgacgacacttcacactacagacatgacattccagggtaattaccttacggagagtaacaataaaggtgttgtcactgtgtggaatgtgtagattcaaggcatgtatatgtatatcgttatgtaaatagaggaaattccgaaaattgcgagttttgtcgacatgaaaaattatttcactgtgaagaagtaggtctgtcttagagtacacttcttctttggataacaagcatgtcatatagacaaacccctactatagttgtccttcaagaaggtactgatacctctcaaggtagaggacaaatcatttctaatattaatgcatgtttagcaattcaagatacattaaaatcaacacttggaccatttggtagtgatcttttaatggttggatcagatggtaaaacaacaattactaatgatggtgcaacaattttaaagaaattagatgttgttcatccagctgctaaaattttagttgatattagtagatcacaagattgtgaaattggtgatggtacaacaagtgtttgtcttttagcaagtgaaattttaaaaaattgtaaacctttcattgaagaaggtatgagtagtcattcaattattaaaggtttaagagaatcatgtaattatgttattgaaaaaattaaagatttagaaattaatcttgatgaaaaacctttagatgaagaatatgatatgttaattaaatgtgcattaactgcaatgaatagtaaaattattcaacaaaatggtaaattttattcaaaattagttgttgattctgttttaacattagatagagatgatttagatgaaaatttaattggtataaagaaaattccaggtggtgcaattggaagattcattatttattaaaggtgttggatttaagaaaactttttcatatgcaggatttgaacaacaaccaaaaaaatttattaatcctaaaattttatcattaaatgttgaattagaattaaaggcagaaaaggataatgcagaagttagaattgaaaaagttgaagattatcaaaaaattgttgatgcagaatgggggattataatggataaattaaataaaattattgaaactggatgtaatatagttttaagtaaattaccaattggtgatttagcaacacaatttttcgctgataggggtatattttgtgcaggtagagtttcaaatgatgatttagaacgtacaaataaagcagttggtggatcaattttaacaagtgttaatgatattaataaagaaattgaattaggtacatgtgaaaaatttgaagaattacaaattggtagtgaaagatttaatattttcagtggatgtccattaacaaagacatgtacattaattttaagaggaggatcaattaaaattattgatgaaattgaacgttcattacatgatgcaattatgattgttaaaagagcattgaagaataaacaaattgtttcaggtggtggagcaattgaaatggaattaagtaaaaatttaagagattattcacattcaattaagggtaaaagacaattaataattcaaagttttgctaaatcattagaaattattccaagacaattatgtgaaaatgcaggtttagatagtattgaattattaaataaactacgtaatttacatgcaaataatgaaattaattttggattagatttagataatgataatgtttcaaataattttgaaaaatttatttgggaaccatcagttgttaaaattaatgcattacaaagtgcaacagaggcagcaattttagttttaagtgttgatgaaactatacaaaataaggaaaatgatgcacaaggtggtgcaccaagaggtagaggtatgccaatgccagcaggtatgtaaatatactaattaatagcttttttaaaattttctatagttttattaactaataaatcatcctttaaatcattcttaattaattttttaatctccaaccaagtattatcagaaatgaaagcttgttctatttccttttgactatcaatatccattggttcaggagattctataaattctttaaatttagaaatcagtacattaaatgacactttgataacatcatcaccaattgatgaaataactaattctggatcattcaatgtctttgcacgtaacattaatttaatatcagctggatcaataattaattttaattcatccttaagtaaatttgcaagttgaattttaatttggaaaatacttgtattattagaaactggtaattgtttaattatattaaattttggttgtctaagtgatttaaatgtaaattctatatcatgagttgattcagtggtagtatcattattatcattattatcactatcatcctttattataaatggattgacgatattggggaaattaaaagattttggtagtttattaacattattaatattaaattccacaatttcactgttaccattacctgtaacgttcaataaatgcaggaaagtctttgcaaactctacttcagttgtcattacagtgtcttacacaaagaaaagagtgttaataacccatataaatcctacttacctacttacttactcgaaaaactacttttttgtgtaaattttcttaattcttctattaagacctgcattccagtaagctgtcttcagtttacgtatattaacatcatctgaccagttggttataccgtttaactctggtaataatctctcgttatcattgaaccatttattgtattcattctgtgtaattaaatttctaaatatttcaacaataaataaattaacattaattattcttttaggggtattctgtataatttgaaataattcagtcattaatttacatttctttaattctggttcaagcatggaaaatatacctaatgatatttgtaatataattttagggtgttcataaaatattatatcccaaatacgtaatgttgattcaattggtaatacaccaataaataatgacataaaccaattagttgtacaaaatgttaatgttggtatatttgaattatctgattcattattattcattattattttccaaacatcaggtaatctatcatgtaaacattttaatagggaatattgatatgttgttaaacctgataaatcagttgaatgtacattaggtaaatatttatcatgttattatagttaacatccaaaatgccttcctcctctgacataaatattaataacataccacaaatgaaattcaatgattgacaataaccaattttggtattataaatactaaaagcttttaaaactcttgataatgcatcaagcattggattagtactattattatcattattactatcagtaaaataaatattatccgggaaagttctattcaaatctttttctatagcatcaatatatttacattgatttaattttaatattaaattttcataaactcctttattattattcattaattcatcaccattaacaaaatgaaaccaagctttacctctccattcaggtggtatacctttccttataaattttttcaattcatcaaatttaagtgggaatgaattaggtaaatgagttttatcatcaataaagcaaccacatttatttaaaaatttaatccatttacgtttacgtcgttttaaatatggataataatcattccaccaagattgataatcttgaattgaaatatattgtgatgatatattaaaaccataaatatcatgtgtaagtggtccttccctattattaccattgtgtttcatattatgtgagatcttcctctttaaatcattaaactgtatccttgaattaaatatattatcattttatcattattatcattattatcattattattaatagcagacaatgattctccctcactctcagcatagatatccaacagagtgcaagcacccgtagtggcagtagacgggtacctctgatgtgtcatagtatctataactgtatatctactgcttccaaagcagaaaagaaaggaaaagaaaagagtaataagagtatttaaagagtaataagagtataataaggaaatacctattaagccgcgtcgtaataattggcaacatgaatttgaacatttacccttaactgcttcttctgcttcttttggaactatggccactgtggaggactctaatatctatctgaaaggtctaagtgctcaccaatgggtcgtggtgagagttattgctatagttatctcttcaatttcaattatatcaggatttgtgttcatttatttctttttaatgattcatccttcaagaagaaatttcagacacacattaattatgtttttgatattctttgacttcattaaatctgttgcaatattagtattttcttcaatgacattggccaaggtaaacgatttagatgaatcacttatatctggtattggttggttggcagttttctcaatagaaggtgcagatgtaattattttctcatttgctattcatatggcattacttatatttaatactcaaaatttacaagttaaaaattatctgggtagtaaatttttctcctttggaaatcacaataactctgataataataccacttcaattaataataatattaataataaatcagaaggtggattatatgattacagatactataatctacattatttcattcttattcccaattttacttgcttcaattagttattatatggatactccatatcaagaatttgtttatatggcattttttagaatttatactggctcttggtggttctcttggtcaattcagacatgttatcgctgtagggaattatagtcatttatatcacaatttatgtctatgttatgatgcaatttaaaaaagtctcgaaatcttttaaaaagaggaaaaatacagttgttggtggagtgccaggaaaagtgatgactgataatgatgatgaagtttctcagatgatgaagataagtgaagatgatggattactgaaaaatactttcggtggttcaattatggtatactattttaaatttttatcaatgttagttttcccagatgttagaatttcagcaaaattacatggtacattcattgaaaactgatcaagatttgaaaaatattgaaaaattgaaaaatgaatcatcaattcaaacagattcaataatttcagataatttccgtagaattagtgatttaacaatttcaaatgattcaaattcaaattacaagtttgaataatttttcttcatttaattatgcaaatattcaaaaggaagaaatttctaaacaaattcaaaatttactgtatgatgaagcaatggataaatttaattcacgtaaattacaaattatgaaacaaatgaaaattattttcatttatccaatttcttttattttgttatggttatttccttttattaatcattatcaagtcattagattcaaatatgaaacaatgtggtcaactgctccttcagcagttttccaaccaatgagttgttttgttgatacaattgttttcctaataagggaaaaaccttggcaattaactgaaaatattaatcaaatttcaaataaaaataatttagataatgatgaaaaaaattggagatattatatttcttggttaccaggttatggtaattatggtaatatttcaaaatttaataattcacaaaattcatcatttaattcatcaaaattagaaaatcaagattattttaataataataataataatgatgatgatgatgatttcatttcaacaaatgattttaatgaatctgatgaaatgagtatgactgattttcttaatatgaaatcaatacccaacaccaaaaatattcaaagaaaggataaaaaatataatcaattcaaaaataatacacaattacatccaataaattcaatgaatgaatctttaattaatatacccacaaaagctaaacttaaaaatcaatttgattggaacactaatatgtttgaaaattctgaaatggatatacaagaatttcttaaatcaggtccaacaaaataatttacacaatttaatgctctttcttttacttgctttacttatcttcttttccacaaaaaaaaccgtccctttatttatttatttaaattatttatgtttacttattataaaaaatacattatttctccgctgtaactaacatcaatgtatcaagacctacaattaaaccatcactaaatgatgaattccatgaattataaaaattttcaatttcttctaaactaccattattaatccaaactatcaccactattattattaaataatctaacacctaattcattatcataaccttcattatcaacattttcacttaaccttttaattataattttatgtaatttttcactattaacattatttaatttccaatcaatccacattttcaaaatttcaattatttcattagttggtaatttatattcctgtggattattaatccatgaatttaatttacttacatgtgaaattcttaaaaaatctaaaaatgatgaaaacattgcatacattgatgcaattggttgatctgcaattgttggtattgatgaatttcttttagatgattcaatttctccttgattttcattagtttcatcaatttctgattcttgaatattctcttgttcatcaacttcttgttcaattggtttagatcctaatgaattagttggttgaatattatttggagttctagtactcgtatatgaatcacttaattttgttgatgacctttgtaattttaatgaaattaaattatttgaactattttttttacttttaattagtgttgaattagaatttgaatttgctgttgaatttgaatttgatttaatggttgaattgttagaattttcttcattttgaatgttatttaaattattgtttgatttaattttaggtattggaattggaattgttgattcattagagttaatagctaatgaaggattttcatgttccttttgttgatcaacaacattatgaactttattatccttattattattcaaactttcattataatcaagaacgggtataccaagtttagtaaatttaatatttttaaaatttttctccttcaaaatatttaaaactaattcagtaattattgtcatatttgaaatttttgaaattaaaaaattaatataaatttgaatatattcagataaaaaaacattatgttctaaatttgatgaatgtttataagttgaaatatcaaataaaattaatgaaattgaaccacctatttttaaaactctataaatttcatttaaactatttttaatatcattttcattttttattaatcttgtaaaatcaggtgtataaactaaacattgtgaattatccctaaatggtaatttatttattgaaggtacaataaatgatgaataattagttaaaaaatctttctctttactatctaatttattattaacaaaatcttctgataaaaatacataatcattaaaatgaggatattgttgtaaaatatcaattggtaaataacttgtattattcagatttaaaattgtttgaaatctatcagcaatattaatcatattagttttataatttgggaaatcatgtcttaattgccaaccatcaattagttctagttttgatgggaataaatgatttttaaaaattttcggtaaagattcatcaggtttattattaaaaggtttgattttgtttgttgttataatacaaatttcttcattattatgagtattatgagtattatgagtcttacttgcttttgaagtaaatttgttaaaacattgcttttgatttgataaattcgtataatatttgattttgccagagtaaaagtagtaaaattctacgatcttggaaagtttctttatcaatttgatcaattgttggtatattttttattttcaatttaatttcttctatttcattatttaaagttgttaattcatcattattttccatatattcatgttcattacttttagaaatattcagactatgattatcatcatcaattgtaatattattctcctatattattttcattttctaaatgattccttattttaattaaatatttaacaaaccattgattccaaaatgaatttctcgtatttgaataaatgaatggatcattcccttcagcttcatccatataagttaagaaaaatctaagataatccagataaaattccatactatgagttcttgttaatgtcattacatttctcagttttgtatgatattctaaatacaattgttgtttaagatgttgtctttgattaattaaactgggtgtatttattactattaatactattattattattattattattattattattattactatttcttaaatgttgatattcataatgtttttgaggattaaattgtggaatataaggattatgattaactggatcctctgcaaatgcattaccaaatgcaatatcacttgcaaatttagatgcttttttggtaaatttaaataatttactccttgtattagtattattattattattattattattattattattattattaatagttgaatttatagtggtattaactgttgaattattacttgataaaatcgaatgagttggagatgttggatgattattataattattattataaattggcatatctggtgtagtagatgaacgttgaatcattgtactttgactataccttgaatcatccttcatcatattaattgaatgaatatttggagtattattatcattagataaattatcattagatacattaccacctttatgtttcctatggtgaaattttttaaatatatgtctcttattagttatcttagccactccaatatcagcttcctcatccaccgtatgatcattacgattaatcattgtgtgttgtatggtgaaagatctaggataaaagaagttacagtagttaaactaagaagaaatctggaaattaaacataccataaattacttaatcaatatataccttacagtctttaaacagtgataaatggtgaagagtccttctctgatatgataacggtaccatcaatcttactagataacaactctttcattactttaagatatcctctctcaggtatttgaatgtccacagagaataactgatttattattagttaaataagctaattgttcatgatgtgataattcaccagtgtagtaaagatcaatagattcattatcattaatattatcaaatactccactgccactacctgcacagagagctattttcttaacaagtgtatccttattaggtgtaattaattgaaggtattcaatacctaatgatttcttaatattattgacaatgtccattaatgataatggatttgctaaagtaacaattctacccatacctatattatcattagtagcatccttttcaataacctctgtagtgatatcatcattactgatccccttggctaaccaatcattaacaccacctattgcagcatcaactgctgtatgaggtgaataaacacttatattattttgaattaatttaattaatgatctatgttgactattattatctggtgtaatcttattaaatttacgaaataggaatggatgatatgcaactataatattaatattattagcaattgcttcatctgcaactgattcagttaaatcgattgttaacattatatttgcagtaggtggatgtactcttttcattactactatcaactaataaaccggtattatcccaagtatgattagcatatttaagaggatacaatccctccaaggcagtgacaaccctctgcaatgacgccttacttaaaccagacatgttgtcttgatcttgtcctataaagaaacaacaaattgtgattactacactactaatttttttccacccattaactacaatctctttctttcaagacattaagacaaacacagacaaccaatgttaacatcagaatcattaacagcaataattaaggaacgtttacaggctacagaggtagaggtacaagactatgtcaggtggttgtggacaagcatttgcagttataattgtaagtgatatattccagggtaagaataaactatcccgtcatagattagttaatgcagctttacgtgatgaaattgctgaaattcatgcttttacacagaaagtagtttacagttagtgaatgggatgaacaaaagagaatgtttagcagttaagtaagttatctatgtatactagtttataatgaataaggtggtggtgcagtaactacattattattattattattattattattaagtcgacgtttacgttgttcaactaatctatctaatttagcaacacgtcttcgtatttccttttcatcaggattagtagtatcattggtaggaagtgcccgtagtcacctttaccgcttcattggtttgtaatgtacgtttaatagtagatggacgtcgtgatgatactgatgaaggtattgaactttgtcttctagatgaacgtcttgacgttgattcactactattcattggaatagatttaatattatcctttacttccttcctcctcttcatcaattattgcactttcattaatttccttcttcttaacattcatcttaataactcttctctttggtttatgatttgaagttttcaaaaatgctttattttggaaatttttaataaatcctaatttatcattaatatcaccataattaaaatcttcttcacttcaaatcaattctattataattactaaaattatttgaattattaataattatatttaaatatgcctttgttataatatttttattaaatctatcacatgataatttatcaattccattacctaaacttaaagtttgtctaatacttgataatcttgtactcctcattaaactaccaggtgaaattctaaatggattttcatggatctaattcttttaataatattttattcttccttttattaaaatcatcttcttgttcctcaattaataaatctttatgaaattgatcaaatgattgtgttgtatatttaagactaaatttataaagtaaacttggtaaaaattctttaaagatatcacttatttgactttcaatcttcttctgtaaaaaattagcaattggtgtaattttatcaaatgttgaattaacatcaatattttccaaggggatcattcttgaaaactaatgttaaccctttactcttactgaaaacaattataataattgaactcatttggaaattacttaatgttaaatttaatggtatatcaaaatcacaatcacttacaataaatttaggtttaataaattccaatttttcatcaatattattattataatttttcaataaacttgcactaatctttgtcttaacagttataaatgcatcaccataatatttaaattggaaaatacctctaaatttatcaacacctaaatcaccaatttcaagtatttggaaatttggtgcaattgtaccaaaatttaattcaattattttaatttcatcacttaaaatacttggccttttaccactatttaatgcttcctctaataattccttagtatatgtagagaatgaatctttctctattgcattccaatttaacttaaatgacattgctaagaggaaagagaggcatatataggaggttatattattattgacattacgtaagttgtttgtatttgtataattatataactgttacactaaacaagtttatctaaatcaattctttcaatatcattaactaattgtaaaactgatatgtctttacaatcggtattctctgtaatttcattattttcaatacttgatattaatgaattaatattaaattcatttttaaattgattaattaatttttcattaattttataattaattaatgaattattatctatttcatttatattttcaattatattattaatatcaatacttattgatattttttcaggtgatattggtataaaagtattattttgcatacctaatttaataattgcatggaactgaggtaattcaattccacgtcttgattttttaattttcattaattcataatttgtttcaaaaattgtatcaatttcattttcaattaattcatcttttgacattggataagcttttaaaaatgccattttaaattcatttttagttaagaaacctttattagatttatcaaatttattaaataataatttaattggatctgattcaatatgaaattcattcttaattaatgaatgaattatattattattattgttactgtcattatatttaattatattgtataatttagaattattagttaattgttcattagttgatttaattgattcaattgatttaattaaaaatttatttaaaaatgataatttattacgttgtttaataagtattgatttataatcatttatggttctatcattattaattgaatttaaattattaattaaattattaatttgatatgatgtaaggtataaattatataaaccttttaaatcttcactaatattaaataattcaattttacgatttgaataattatcaaattttgtaaatgattcaattatatcattttcaattattttcaatgatttattaatattggtatttattttttcaaatttattatttaattcatttaatttatcattaatgaaagacattatattattattggaattattaactgatttaattaatatatcataaaggaaattaattttttcaattgattgttgttcaggttctttaaattttttcaattgataatttataaggaaatcatttaatgaagatttaagtaataataattctaattttgattcaaatattttattcattgttgaattattaaaagtatttataattgatatattatcaataaatatatcaatatcattattatcattattatcttcaattttaataaattcaattaattcattaaatgatttacaattatatttccttatttcataatcataattataatcataacactcaatttcattaaacttaccaattaattcaacaatttcaattattaaagtttcacaatttttaattaatttaaattttaaataattaatatgacttataattgataaaaataattcaatatttaattttttctttaatttatcttcattaccattatcttcttcaatactattatctaatggacctgccttatataacacattaggaccaaagaattcattaaattctgttaaattgttcattgctcatataaagaaagagcaatggataatacaaattataatactggagattgcgcttatacaaaaaatatacaaatactctatttattcaaagaaaggatgattaattgcttccattgcagttaatcttaattgatgatcataaattaataaattatcaattaaatcaactgccaatttattatttgaataatttttattatcttgattattaaaacttgaccaaggtcgacgtttataatcacctaaaattggatcaaattctgatggtaattttaaaccatattttgaaacataatttttcaattcttgtgtacctaaaacttgagcaattttaattaattgatcttgatttgaatcacccttgaaagaaaggttccttacgataaataattgcagctaacattgcaccaactgaccataaatctaatgaataatcatattgttgtaaattaattaataattcaggtcctttatgataccttgaagcaactctaacattaaaattagtaccaggatgataaaattctgctaacccccaatcaattaattttaattttttattaattggatcaatcattatattttgaggtttaacatctctatgaattatacccattgaatgagcataatttaagagctaataataattgtttaaaataaaattttatatcattaattgaaaattttggatataaaattctaaaatctatattattaactttttcaaatataagtgcaggtatttgactatctttatcttgtaaaatatcataaaggttaacaatatttataccattatttaaattttgtaaaattttaatttctctgaaaattttctttaatttaacaggttttaaaactttaacaacacaattttgattatttaatatgcaaattccagtaaagacttcactatatttacctctaccaattttacttacaatttcataatttgatatatcaccccaagggaatgattgatgagtacaatgttcataatcccaataatcattaggtttttcagatagaacatctgcatagactcttgcaacagaatagactctatctgacatgttttgatagatgaatgttcctctaaatggaaataaaccagctgagcattaactgaatatcatgatagcacatcaaaattctttaaaagggcaattggcgtccattaaagaaagtaagagtataaaaattttatagtcacgtgacattacgtaagcaaagaagaataaattaattaattgataaaaatttttcaattagtacacagcaattaattaattaaaataagagattaaagaatagatagtgataattagtagaagacatgcatgaagtatttgataatataatatagtataacaagacacagacatagaataagatgaaatttgctaaagtatttcaacaagctttaaatgatgaacaaataccttcagattggattgaaaaggcaattcagtataaacaattaaagaaaagaattaataaagttgttaatgaattagaggatttaaatatttataatagtgaagtaaataattatgaaattgaaataattaataataataaattacatacaaatttaaatatacctataacttcaataactaaaaatagattaattaatcaattaaataatagttcatataattatgaaattgtacctataaatgataataatgataatgatactactagtgatataaatccatttgatgattcaattgagagttataatttaaaaatttccctattagaggatacaaaatttttccaaattttatataatgaagttgaaacacttgaaaaatttaaatttgaagaagaggaaatttttaaagagaatattgaatcaatgtgtagtataatatcaacattaacaatacctaataaaagaaataatgatttattaatttggagacaaatttttaaaatttatattgaaagtgaaattttctttagtacagttgaaagaatggcaggtaaaattgataatattgatttaagtagggatagattaatattatttttcaagaaaattaatgaaactaaacttttggataaattccataataaacaatcattaaatatttatcaaaattttaaaacattaaattttgaaattattaaagtatccaattatgaaaaatttaataatttagcagttaaaaagatattgaaaaaatttgataagaatacacatttccatagtaaagatgtatttagtagtataatacataagaagacaaatgatattacgaatataagtttagatatttattatattataaatagtaaattattaccaattataccacaaattgatgattatttatgtccaatatgttgttcaatagcgataaagccgataagacttaaatgttcacatttattttgtattagatgtttagtaaagttgagaagaaagagagaagataaatgtccattatgtagagaggaatgtttattagaattaacggttaataatttagatgagagtttatacaagtatatgaaattgtatttcccagtggaggttaaagagaaagagatggagaacagcagagagattatcaaagagcaaatgggggacagtagtggtaatattaacaagtgtttgattatgtaaggaagtgcggggtgatattctaatactatgataataataataaaatatggggaagtgaaatttaatagggaaaaccctatttttaattaatgcggggaattagagtgagtggctgcaatcggattaatagttttcttttctgccgtttctccggtttattatattatattattgctatctatgtttgctatgtttgctatgtttgctacttttccacttttctggggtataaatactgaagtatttcccccagacttttctttttccgttgtgcatcttctctctcatttctttctcttcttctcttctcttctcttctccttctttatacaaacaatgattaatttacttaataaaaataaagaaactgtctctgcaactccaaatcaagacatttcttcaactaattctttccaaaataattcatcctcagttgaaaaattatcaactaatgaatttattgaaagagtcgatgctcctcttacttggagaacttgggttatctgtggttttcgcctcattcggtggtatcttctttggttatgattcaggttatatctctggtgttatgggtatgtcattctttattgaaacttttactggtaaatctccaactgatccaggttttgctctcgaatcttggcaaaaatctttaattacttccatcttatctgctggtactttctttggtgctcttaatctctggtgatttggcatgattttattggtagaagattaactattattatctcttcaattgttttcattattggtgttagtcttacaaagttgcttcatcatctgtcgctcttttaactgttggtagagttattgcaggtttcggtgttggtggtgtatcttcaacaattattctttatatgtctgaaattgctccaaaaaaagttagaggtacaattgttgcaggttatcaattttgtgttacacttggtttattacttgcatcctgtgttgattatggtactaaaaatagaaatgattctggttcttatagaatcccaattgctttacaaatgttatgggcaattattttaatgattggtttaattccttttacctgaaactccaagatttttcgttaaaaagggtaaaattgatgaagctgcaaaagttttagcaactttaagacaacaacctgttgattcaacttatgttcaagaagaattagctgaaattattgaaaataatgaaagagaatctgctttaattccaactcaatcttatttccaatcttggacttcatgttttacaggttctttaagagatcaatcatcaaatttaagaagaacaattttaggtacttcattacaaatgatgcaacaatggactggtattaattttattttctattttggtacaacatttttccaagaattaggtacaattaataatgaatttttaatttcaattattacaactttagttaatgtttgttcaactccattatcattttatacagttgaaaaaatgggtagaagagttttacttatttatggtgcagttggtatggttgtttgtgaatttattgttgcaattgcaggtacagttgatggacaaaatcaaaatactgttaaagcaatgatttcatttatttgtatttatattttcttctttgcatcaacttggggtccaggtgcttggattgttattggagaaattttcccattaccaattagatcaagaggtgttgcattatcaactgcatcaaattggttatggaattgtataattgcagttattacaccttatatggttggtgaagataaaggtaatttaggtgcaaaagttttctttatttggggttcattatgtggttgttgtttagtttatgcaattttcttagttcctgaaactaaaggtttaacattagaagaaattgatattatgttagctgaaactaatgcatttacatcatcaaaatggaaacctcattatattaataatgttgatgaatttaaaccagttgctgaacatcaagaagatatttcagttaatgaagaacaagtctagatattacaaaacttttaatctttcttttactattacttacttacttacttactattactttttacttattttaaatgcttaatgatttatgaattatgtataacaattaaatttttttcaatcttttataactatctactactatactatacttttcttagaataaaatgttatgttatcaactataaataaaattaaaaagtgggcgtcgcattaaccctaaggaagaaagctattttctccggaaagttaaaaaaaactgagaaaaacacgaaaaaacttgaaagcccaacagaaaaaatggataaatggataaatggaaaaaataaaatggggaaatggagaaatggggaaaaaataaacacacggcggaaaatatgaaaccggggaaaacaaaattaataatacggggaggtacttgtcggtgtccgtgtttgtgtcgtcatagagtcattctcagtatcatagagtcattataattaatgtgggaataacactttattacttctattgaaatatggtgagcatttactcaagaggggacagtttactgtacggcattgtaacgtagaataaatgaataaatgaataaatgaatacatgaactgatattaattaattaaatatgatcttatatagtacggaataactcggataaaaagtaaaaagcgtgtttcgtgttcgtgtttcctatcggagtacgataaatacacttgatatcaattaaacagtaaataacgtcttacattgtaacttttttataattataacaaagataatgcaattaaaattaaattagagaatgataatgttaatgaatttgcacctgcacttgaaactctagaagatgatgtaatacttccactattacttgtacttgaaattgtattatccattgacatattacccatatccattgatgatgataatgatgatgtagttgacattgtcataccacccatatccatatccattgatgatgatgatgatgatgataataataataatgatgatgatgatgatgtagttgacattgtcataccacccatatccataccactcatatccataccacccatatccatatccattgatgatgtagtagtaactgatttagaacctatatcacttactgaacccttatgtgcatcaagataagttaaaactgaaaatgaatctaattgttttgttgcaactttctctaattttgcaactccttcatcaaatgatccttgggttgaatttgaacattgaccattgaaaattggtccattttcactaacaataacatcaacacaattatacatagtattcataacctttaccatctttactatttgctgcataaataatttgaataacacctgtttgattaattttattatatttagatggtatttcaacacttggtaaacaaaaattacccttttgttgatcaattggttcataaattaattcattaaaatctgatccagttgtacaattaccactaccacagaaatacattgctccaactccaaatgtatgatgataattaatttcaattggtgaaccgtttggattccattcatatcttggtaaaactgctttattatcacctccacatggtgattcagtttgtgtatcccaattagttgcatttctctcacctgggaatggaactcggaaatgtgcacttacaacttctgataataatgtaactaaaactatttgtgcaaaattcattatggttatgttatagaattttctttttgtttggttaagttatatcaataacaatttttatttaactttcataatcttctttttccatacttgttagttgcttatatagtataatatttcaactactatatcatctctgaaaaattaaacgttgttggtattacgatattttttccataatttttcaaattgctaaatttgctcatttttccattttaggtaatgttatcattacttcccattggtttgaattaccaagtatccacttattattcttatcaacttattactttttcatattttcagttagtttaatagtgggatatctttttgccgcttgaactgaccaataatatatcatcattcccaaaacagtgttcttttaaacttttaaaaatgagttattttttataaatttcaaatgcttcatgaccaaataatgagttaattataagaatattatactttatccataactgcaatattcactatagtggtattgtagcacgttgataggctaatcacttgaaaatttattattgacttaataagtaaatttatggttaatttgctctttccaaagaatgtgccaaattaagtgttttattgaattaaatagacaaagtaattatgttcttgatagctaattgaaaagtgataaagagcacatttgtttaaagcaatctactgcatagactaatcattcaatctacacactatatatagcaattggtctgagagctttttgctattccaaaacttatattcaactactatccatagtactaacttcattgctcaaatgccgttaaatttattattatcatcataaaatttgatgatacaatggaaattaagcacatgattgttatacttttttggaaaactttaaaagcatgtatcggaatcataaatttgttttttaataacattcaaacaatcaaacttgttttcatagcatgggtagtagttgttgttttatcttgcaaaacctaatggttaaaaataaattgggagcagtaaattaagctatatttcaactaaagtgaaacaaaacatgaaagaacccatagataaaaatcatattatgaatcaaaatatgttgcaaacacggaaaattatgtttttttacccctacccctgacaaacaataaaatagttgacacaaaagaaatatgcaacagaaataaatattgatagggttaggtatcggtttcaataactttaaatgatatgggaaaaaaggaataatcacaacaatgagtctccaataatcaatgtaacatacacatgtataatattgttcaaattgaggcataatagacgttcgatgtcacatgaaactatctcatcaacttgacagaatatgcttattataattattattgtacaaacttgatgtttggagtctagccattataacaagtacatagagcaatttgatttgaaaaacattccaaagtggtagtcagagttaaaagatcaaatgaataacaacaaaagttagtattaagattaccatggtaaagtactactttaatcaccgaagctttaaacacttactataaataatcgaaattcatgatacaatagagaatttgtacgatttaataaataatttacaaaataataataaaaaaatgaaacgactataatagttcataccatttcaatgcagattgtgctaaacttcttggtcgccatgggttaaaaaaacaagatagccctcacagtgtctacccctcttcaaaaaatgttctctgcaatattgttgaacaataaattagttgattagatgaatggaaggaactctcatatctagtcatcaagaaatataatataatgtgatgaaacatcaaatggtatatgatgcaactaattaataataatgtcatatactcatcgactctaaatcaaatcagttataagtaaggcccatgtttctgcaataagaaaatttttcgatatggttaaaaagctaatggatatcaaaagatatataggttataaaaataataataaaatcattcatcaaagcttaattatgatagagtttctgtcaaattatttttacaatctctataagatcccaatattgtatctaataaataatagaaaaacaatgtatctaagattgtcataacttgaaactgggccaaaatgacacttcccctgcccagtctcctatcccagcgcattagggaattattttttattccatgcataataatttctcggtaaattaaatcctatggaacgtacccatattattttcatctctagaaatgatttcatatgcatggaaaaatagtaattgttacatcaattattcaattactctattattattctattattttgtataaataaacttagagttcaccttttttctgctgaattgcaaatctatcatatcgttgatttgattcctctagatcctcatcgttattgtgaatgatttactttcttttttaattcaaaaaactaataccaattatcttttccacctaattataaacccacaagtgtttttaatatactttattcgttaaaaaaaggtttattttgctttaaattttgttgaattaagatttaaagtttaaaaattaagaaaaaccgttgttttttccctttgattgctttgttcacttgaaacatcactttaaatagtgaatttgtgggggaaaccaatatataatttatctataataatcgaacaaaaaaaactgtctgagaaataaagaactgtttttttcgaatcagtgtttgattgttcaacggctttactacactcacgccctcaattaaaaattgtcgcaaaatgtcttcttcactttacggatatgccagctctaattcaaaatcaaattcaaattcaaataataaaaataataatattaacaatagtatacttaatcaaccactcatgactactgttgatgagtcaataccaagggttaatcacgagaatagtttgggtaattatacaaatgacaatactattaattttatacgaaacacgccaactggtattctaaatcaaagaagaaattcagaatttaatacatcttcattattaccatcatcgttgagttctaataatgattggatggcatgttggaatagaccttataatttatacaataataccaaagctaatacatttaataatattacaatacccaagcttaatgaaaatacattaccaataccagtaacgatgccatttttaaatgttaaaccaaatccagttacaaatagaatttcaactcctactacatacaacaacaacaataataataataataataataataataataataataataattttgaatttatacccccaaaccaaatgcacactccaacatcttcagttgattatcaatcaaacataagtgatagtacaatcaattcacgtcgagctagcttaatgtatccacccactccacaaacttcatcatctgttcatagttataaaaataattttttcaataataattataataataattttctgaacatcaataacaataatcaatttaatacccaacaatttaataatcataatcaatttgaaaataatgtaaatacatttaataagaatactattaatcaatcaattataactgaatcagttgaagaatctatatcatctttagttgctaatgatggaaaagattattatgatttaacagaaggaatatatgttaaattaaatgacatagaagcaagtaatttattaattaataaaagaattattccaatagatttatctgaatcatcaaatgaagagaaaaatgtatcaattagcaatattaccgattcagaaacgcaattgaacaaaaggaaaagtgttgataatggtgataacaaaaagtcgaataaaaaatgtaaaactgattcattcaacaaagattcatttgataacgatgatgatgaggaggaagatgatgattacgatgataacgatagtaatgataaaaacaatgagcatgagaatgatgttgttaaaaaaaataaaagatcaagaggtggttgtttaacatgtaggaaaaggaaaattagatgttgtgaaacaaagccaatttgtacagaatgtcaaagaactaaaatgaaatgtcgatggccagtaccaggttacgaacgtaagaataaatcaagaactagaccattagctaatgatgaagtttatcatgaagtttatggtcgtataaaggtattacgtggagttgtagaatatagtgtagaagaatagaaatagatatatatatatttatatgaatagaataattttaatagactataataattaattaatatcatcggtttttatgtttgatcatcatcatcaaaaaattttgattgtggatttttctccgattgttttttaaggatgatctatggggcgaataaagttgtataaaaatgctaaataatctttttatagtaaatggttcctaggcagaaaatgaacgtcgtgtttctatagaataacgagtggcattgcaaaatatttcaagaataatcaaaattaattataactatattgtgataaataatattgaaggggcccagacattattttttacaaaatgaagattctttgcataaggttcttccatgccaaatagaagaaaaaaactaaagaaaaaatacgaaaatatcgatacgcacagaatctatggaaaattttttagaaaaaaaaaggggcccccctcatccatgaaaggggtcaaagccttcttttctggataatttctattttctatctggtttaatccgtgaacgtccacacgtctatgcgtcgtttacggcttttttcggtttttttgtcgagatgatttacccctcagattcaaagttacataagcgatttacaagatctgctgattttggggataatttattgtgactatacaaagaatcagattttacacgatcagccactgtttcatattggtttcattgctgttattattagaaatagtagcttcatataacctcatctacaaacctacactacgaaatttaatcagttcatctacatatagctcttataagtctaaaattatttaaatcaaagtaccggtataactccgacaagctagtgatatgttgacaggacgtattcgtagagatagatgatttaataatttactttatgacgtataattatgttagctcgaaaataaacacagtctaataagtaaattagattagtgtttcataaattagtgccattcggagttaaaccctaatttgcgaggcgttttccgattaaaaatcatcttatgttccacattacttaaaagggtaatttttactgccgatattgctaatcagctggcattgcggttattttttgttcatttttcaattcatgaattaattagatttaagatacataactaaaaagagactgtcccagaatttgacaaaattgtaaacgtgagtgtgtaaaaaaaagataagaagttgaaaagagctgaaagtattagaaaagattggaagataaaaatgcgttaattattaattattaattgttgaatttattgtaggtataatataattgttgaaattgaatcaaattgttcattccatttaattcaaaatgttgacttcattaggagggttagtaaaagattctctttgttaaatttaagcaataaatcttacatttattaaatcttcactaaaacttattctcttctttggatatgtaggttcactaattgaataaacatttttacgtttctttaaaatacttcttaaaattttagtttcattacttgtagtaaattcttgtttacctatctctggtttatcattatttataacatttggtgatgcatgatttgattgtgaagataatgatgttgcagcagaatcaacactaaatcttctataatttaacatactttcattatcacttgaattagcagattcatcagtccattcatcattcattttacaatcaccatcaatatctttatcaattgtagttatattttcattaatgtctttattaatgtctttatttgaaaattccatctcttcttcttcaattaatggaccataaagaactgtaacatcattttctttaaaccaatttatatcagttggatttaattcttttaaacattttaattttttataccaagctctccaacaagcattctctaatctaacttgtgaagttgttggtaaaaacatcattatatcatcagtttgttgaacagttcttaatttagtaatattatcaacatttgataattcataaggtttcataaattgattattagagatatttttccaacaattatgatattcctttgatgttaaatcatatgaaaaataatcaactgcgattggaggttcagtatgtacaaatgaatctaatacaggatttgtactaataatgggtaatacattaaatttattagtcttaactgattcaataaaattagtatctaagaattgatgtgctaggttcaggtaatcactatattgatgtttttgcttttgttgttcactcattttcgaatataaattataaaatacacttaataaatccagttataagttaaattaatagatataggattccttgaattatgaagggtatatgttaaagacacaaatatataaatattttagaatatatatgggataggataggaaataagagaaaatattgaagtaataagtagatgagatatatgtggggaggtccccaaaaaaacgataaaacagcagactagctttatagatataataaaatgatcaacaagttgtgtaaaaatatgatggttgataaaactaatagagaacgttcatcggatatattcacaataatagataattaaagtttatagtagcaacctagcaattgaaacttgaacaataggagttgtcattttccaataaattatttttctctctttatagtgcggttgaattcactttttattgtcaattttattgtaataataacatgaaactgggtgcactactcggctaagaaagctccaatagagacctattgttactaaatttaaccgatagaagaattaattatttgcaatttgaattattctttagggcgttgttgttctttttctgtctatcctagcattaacatgggctaggataaatgattgatctaaaccgtgaaatgaccatcaccatctttaatctcattggaatcatataaggaataaaataaaaaatttaaccgattttttacggggccttagtatctgcctatccccctcattacattagttaccataaaaaatatcattagtgttaaaaactttatctgagatttaaggtttaattaacttgcaactaagtggtattgtattcaagtcccagtttttttaaactttcttagatttgaattttcttatctttccacctttttctattttttatttttttattttttaaaatctcttaaatttaattaaaattaataattccctatcttttcatttctcactaagtatttcgtgtaaggctcttaatgcatcattacttggcacatttggtaaagagtctagatctaacatgtcctccattaaaacaactggaccttctataccagctgagataatatgttctctttaatggtgatgattcaattgattttaggccttggatgttatcattattatgatgattaagattaactgatttccgtattgaaattattatattgatcctctctacacggtaaagtaaatactattattggtcataaatgcatcgtttttcatacattttgctaaaaaatttgttttattgttatctaaatgacgtctctcatttataaattcctcatacctattcggtatattcagtcttaatttttcctcctcttcccctctcgtatgttgtatttttgataaacttgtagttttgatttgttgatttaagataggggtttgaattttacttatcttcaaatttaccttgagctattctagttgagtattcataatacagttgatttaactcatcaatactgataaacttattctcaagcaatcgtgaaaatattttagcctctccataatcatcaatattaactgttaatttgtatctataattaaatctatgattatttaaatcaacacttttcccatctaatttttgtctatgttttaatgatgttctagtattaatattttcatctttatctattccattattatttgttaattcatgctcaagcttattctgtattttattccttttaacggatctaggtgagctaatatttaatatatcatttctctttggggtattggatatacaaaccggtgatgaattaataaatttaataaattgttcatcataatgatcattactatgaactatatgatcaacatggtgatgattgtaacatttcattatttatattaccataattgaaaactttatctcttactaatggtgatgtatttaatggtgatgattgtaaaatatgaccatcacttgtcattatattactcattggtgatgatgacagtacactttgattttcacttataaacattatttcattacttttatttttttttctaattgaaggacttttataatttgtatttaattcacataaaacacctttaggctcatctttacgatttttcaaatcttttgttggacttaatttcatcattggagttgattgaaatcctttctttgcaatagcttcactttgctctgatgcgttactttcttcagtagaattgagttttaattgaattgttgattctccaatattagatactggctggttcttctttaatgcaggacgtcctctgcgttttttcgttggtgtaaatgcagtatctaatgacatgatttatgttatatcatacaagttatataataaataggaatcaaatgaaaaaagatctcctagtatcagtaacgaatcaaagatgtctcagctgagcctggaaagagatctaactcaagatgaattataaatttaactaaatttaaaagaaaactcagactctatgaaaatataatgtgaaactaaaaaatgattagctaatgcgaccaataacttttcctaattaggaaggttactttgttattactataaattattaattcattatggaatgatcagcattgatcgaccttctttaggttgctacagacattgttgcattgccacctacttcacaaatagtaaatgcagaaattaattgaagactggttagctattgatgttaaccctactactcgtgcacaaattactgaactagctaaggatacagtatccaactatgaaactctcaatgacctgttaggtaaaaggatagtgtttggtacagctggtttaagagctagaatggaagcaggttttagtagaatgaatgatgttactgtattacaagcatctcaggggcttgcagaatacattaaatcaacagttgacgatagtgcaagtctttcaattgtcataggacatgatcatcgatataattctaaaagatttgcagaattagcaattgctgtgtttataagtaaaggatttcaagtatattatataggagataacaattgtgcaactccaatggttccatttgcagttgataaatattctacaaatggtggtataatgattacagcttctcataatccaaaggatgataatggttataaagtatattggaataatggttgtcaaatcatacctcctcatgattctaatattcaaaactctatattagaaaacttaacacctatattaaataaagatgatggttggaatactgatatttatatgaaatctgataaattgatttactgttttgaagaagttgttaattcgtatgttgattatttgagaaacgagtttgtttaaagatgaaagtaaaattgacttcaaatttttatacactgcaatgcatggtgttggttatgaatttgttgaaaagttattaaaaggtgtcacaccaaatgaaaattttgttaaagttgaaggacaatgttctccggatcctgatttttcaactgttaagttcccaaatcctgaggaaaatggtgcattaaaagtagccactgaaactgcagataaacataatgtcaatctagtacttgcaaatgatcccgatgctgatcgtttcactgctgctttcaaatcatccaaggagaacaaatggattcaattatctggtaatgaaattggtattttatttgcagactatgttatatcattacaggatccttcaaaattagataaattatatatcttgaactcaactgtttcctcacaattcattggatcaatggctaaaaaattaggatttaattttaaagatacattaaccggtttcaaatggataggtaatgaggctattgatttagaaaatcaaggtttccaagttccatttgcctatgaggaagctatcggatttatgtttaaaactgtacatgataaagatggtatggcagcacttttaatgtttttacaactttatcaaaaattaattaaagaaggtttagatcctgttgctaaattagaacaattatatgaaaagtttggatacttcaaacaatataatggatattacattactgaaaaaccgaatacaatcaaggatatatttgataatgttataagatcaaatgattcatcgattccatatcctaaaacacttggtaatttttcagttattgaatggagagatttaaccatcggatatgattccactactgaagataataagcctaaactgtttgttgatcctacttcacaaatgatcacttgtacattagcaactggagctgaaaatgaatctataagattcacagcaagaggatcaggaactgaacctaaattaaaggtgtatattgaagcacaggcgtccaatgaggtaagatcattacaattagcagagcaagtgtgggttcttctcagagaggagtggttccaaccaggtaaacatgaacttattgaaagaagagtgtaagttgatgtatatattattaatttaaaataaaacaagttaaaaataactacgtaattgaaaaaaaagtgaaaaaaaaaatctttgtttacatgtttttgtttcgtttttgatctttcggtttgaggaaaaaaattggcaatttctctctcatgtgacggctgttatagacttatttaacgttttttatttgtagatttaatcgtaaactcttcaaataatcactagatctctattgaatcactctccagcaatgataatgcgagatacctggaaacgaaagaagtcagatttaccattaactatgaaaaataatggtatctttaatcctcataggaagggtaaaaatgataaaagtcttgtatataaaatgcttattggtggttgtattgcactttttgtgttttgttatacactttcatctacatgggggaaatctgttgatattagcaacattcctgaaaatgatataaatccattatatgcacaaaaacaaaataatttaaaacttgaaaatcaaaaattaaaggataagttacaaagtatagaaaatggtattgattcattacaaaatattgaaaatgatgcaaataatgcacttgcaactccccctaatcaagatgagcaactgccttatggtgtcgagttttatgatttaaaagattatgaaggtacagttgatggtaaaaataatgaagaaattgttttacttttaattcctttgagaaatgcagagaaagttttaccacttatgttccgaaatatgatgaacattacttatagtcataatttgattgatattgcatttttagttagtgattgttctgatggtgataaaactttagaaactttatatgaattaacagctgcaatgcaagaaagtaaactaataccaattttagaagcaaaggaaaagcaaactaagggtaaaggtgttttcggatcaagtgatttatatttaaaatatatgcctaaggattatattgaaagtgttaagaaatcatactcaccacctttccatagtgaatatgagaaaccttttagaagtattcaaatttatcaaaaagattttggacaagttattggtcaaggttttagtgatagacatgatattaaaattcaaggtattagaagaaaattaatgggacgagctagaaattggttattatcaacagctttaaaaccttatcattcatgggtttattggagagatgttgatatcgaaatttcacctggtgatattcttgaatttatgatgaaatttgcaactgattttgatgttattgtaccaaatgtctggagaccattaccaacattccttggaagtgaacaaccttatgatttaaattcatggattgaatcaaatgaaggtttaaaattagctaaatcattagatgaagatgatgttattgttgaaggttatgaagaatatgcaacttggagagctcatttagcttatattagagatgttaatggagatcctgaggaaataattgatttagatggtgttggtggtgtttcaattttaagtaaagcatcagttttcagacatggatcaaatttccctgcttttacatttatgaatcatgcagaaactgaagcttttggtaaattaaccaaagaaatgggtctgagagttggtggattacctcattatactgtttggcatatatttgaaccaagtgaggatgatttaataaagatatcaaaaatggagagaaagaagagaagatttggtagtatttaacgttgttcaagttatatttcgttagtttgtataatttataatttaattcctaatttgattttaaactaattacagtttattaaaatatggattatagtaaaattaattatacatttttatatgggtattataaaaaaacaatgtaaatgcatgcaaaaataacgagtggataataatagatatgattattaatgattgatgtaattctaatgtaacttttatttcatatctattataattgagtggtatacaaaatgtcttttctgtgttttattataagaatacggctgaaagtaataaatagatccaattattaactgatctattaatattagcactgttagaatgacttgaaactgatgctgttatgctttgagttgatgatgttgaactaactaatgttgaactaactaatgttgtttgaacgtcatgttcaagtgtagaatcagatgtgataggagttgttgtattttttggtgggttaacaaactttatgttattatttctttcagctaatccaataagttgattttcataatcaaattcaacatatttatccttcatgaataaaatacctaaaatccatgcgccatcggcagttgaatcaagtccttgaatattactaatacaataaccatttaaatcagtatcagatccatattgagaaccaatgtacatatctggtgttaaagtccaatttttatctgaaatttcaaatataaattctaaagttgagttacatagaatagcataattttgaccatcagtaattgaactatcaaaaaatgaatgtaatctatttgcatcattttctgataaaactagtgaagtagtaccactatctaacaaaccaattcgtgaagtattactttgctcaccattaatttgaattgaatcaaaattaatttgataatcattaacataaacactttcgatctcaatttcccagtgactaacagcttcttgaataattggagattcatatatatcaccattatgtaaaatttcctttgtggaaccaaaaaataataatccattattttctgtatcactttgataatcaccaaaacaaatagtgaattttgatgaatcaatatcaccattttctgataaaaatgagattgcattaactaaaccagtattagaagtattatcagctggtaaacctaagacacctgaaaatccataattttcgaataaatcgggtactttatcagcaacaccaaatgaaaaattatgagtttcaaaacctccaataatgattgcatcatcatagatcaaaccagatgcaacacctgaatcataagataatgcaaaagtaccatttttcaaattagcatcattaggatcaaataactttttatctttacatgaatcatcctgacaatcagtagaatataaccataaatatggtgatcctgtatcaattaaaacaggataatcttttgcatttaaagtgatatttactgaatatgcttgatcctcattatttgaatataaatatgacatacctgcagtcattgtctctgtttgaattgattgggttaaagatgatgactctttgatttcagttgttgttgtagatgcatttagattaagtacaccttgtttttgatgtttaatgaatgatggtggtagtttctctactacggagacataatatgaattatctgagtctacatatgctggatgaattttgttgaatgcagttgaaaacttggccagcaagataaaggtaaatatttgtttcagaaacatttctagtattttaaattgtgatggtgaaatgtgtgttttatttataatttaaaacacggggtatatgataaataaaaggtatttaacagggtaaattgtttatttatcaggttcaaaatgctagaaataaattgatgttaggtagggagtgtattaataacaagacaacaaaaacaactaatggatctatatactattaattgatattaatattatgtgttaaattaaaaaataaaaaataggaagaagcaattcaaatctatatgatgtccaagatggtcaaaatgcagaagatatagctcgagtttattttttttcagtactagtctagtaccttacgaggttgtttagttgacgataagtccaagacaataataacatccgtgaattccctcgtgaagaaatagattctaacaatgccaacgtgtgcaagagcgtgttgatgttttccttaaagaggaaaccgcgttggaagtcttacctaaacagatgatgtcatcagttgatggctttttatgacagcgtatttgttgtggttgggtacatgattctgacaaattaagctttgatgcttgattttaagctttatgtttgacatgtctcgtaaatgtacttgcatagtcatcatttgttgtgcattcggctaacattatcactatctcgataaaaagtttttactacagtcacatgatatacataatataataaatattaattaagtggaaagagaagaggaagaatatacagtggagtttatctcttcttatctcaaaataacactatcaagtctagccaggtcctccttgctaaaatataaatcagattcttctaagaatgttgcattttcaaactttcttctttcgtccttttcaatattagattcctttaatccataattgtcaacaacaatatcttctggatttttccatctaaataattcagtgtaactatcattcttattttcaactcttgaaacaactgtcttacctaaaactggtaaaaatttaaatccgtgtgctgaaccaccagttgcaacaatcaaatttttatattcaggaacaaaatcaataataaaatcactattgatagcatcagtataccaaattaattttgatcttaatttaacaccttcaagttgaacaacatcaggacagatagtcatcaaaatttccttggcttcttgtataactgattttggtaatttttcatcacctaaaatttgtggaactgaaatataactatcaccgatcttctttggatttaaatatttaacttgtctagtattaacttttaaaataccttcatgtttagtatttgggaaaaatgcaaatccaccttcaccatcatagaaacctttatttctatcattttcactggtggttgtcttccattgaatatgtggatattcagagtatttatcaattaaatcttgtctagattttgggatttcaagataaacaatgttagctaatgatgcttgtgtacgatgttgtaattgtggaactaatgatgttgtccatgagcctgcactgacgataactaattcagccctgtgtttaacaccatcttcagtaacaatacctttaacgacagatttatcctttgaacagtaaattggttctttgaaactacctgcgtcaccatagaagaacttaacaccttccttttctaaaagaattttaacatagaaacatgccttatcagccttgatcattctaccaattgaatctaatgtaccagaaacactagtaagtttatttcttttctttaaatctctgataacttcaagttttctatcaataccagtaagtttagctcttaaaagatctcttttggagttgatattatattgagtatctcttaatcctaattcagtgaaaccttctaagtttgcaagttcaacaggaactaaatttggttcatcattgattcttaaaccacctgataatcttaataattctaaatcactatcaataaaacgtgatttatcttcatctgataaattttgaatttctttgttccatgattcccaaatatctaaagcttcaattgcaagttgagaatagagagttttgttttcatagtaaatcctgaaaaatttattaatatcaccacttgcagaacctgatccaagtaatggtgagtatttttccttttcataatcagttctatcgtagatttcaatatttttatatccggctttagttaagttaagtgctgatgataaaccaaaaacaccggaaccaatgataataatttttgaatcttttgaatatgacattttactagtttttgtctgatttcttttactcaaaataaagcagatttaaacaatgtgactggtccactcattccgctattctatcttgtaggtaaactctaatctttttatataatatatatatatattatatattatattttaaataaaagttgacagatgtcggagaaagaaagtgaactttccccaatagatcgatactgagtaacctgctatcagccacggtttcggcgcaaaattacctaatatggaaatagatctgccgctcgagtctgttgtgggcgctattctaatagcaagaatacacatgttattaatatacatttacaattctcagaaatcataggctgttttccaaaatcgtgctatttttgatactaagatcatttgaagaaaatattaagtacatttttcagtgaattgatctatccactgataagcaaagagaagaaaaaccgtttttaaaactgtggttccaattatgtaatcggcggtaaaaaatttccccattcggaacttttttttccaacgaaataaatttttgtaactttttttgggtaattttttaatcctaagaactcttttgaaagataatactgaactccaactcacaaaagaaacttttgtgattcgtcaaaacttttctgtgtataatatatcagttaatatcagttatcaatcaagaaaatggcattatctgttaaaaaaattgcaatcattggtggtgggccaagcggtttagttgcattaaatgaatttttacatacatcatcagatagtagttctaccataaatagtttcaaaactgttgaaaatgttttacccaaatcacctgcatttgatgaagttgttgttttcgaacaaaacagtgatattggtggtgtttggtcacataataatgaaactgatgataaattacctgaatcaaaagacttcttatctccgagaaatattagacctgcattatgttgtccgactgaagaagaacttttaaatcattctaaggaaaatccattaatcaaacaatcagaacctgttaataaagataaattatggagtagaagtgcagtttacgatcatttattcactaatgttccaaatagattaatgagattttcatcaggttttgatatagaagttgaaggtactgatgaaaaatcaaatatcttttatcctttcgttcctcatgttaaagttttagaatatctaaaaaaatatgcagaaataaacgatttaaagaaatatgttagattcaacactattgttgagaaagtttataaaaagggtgagaaatgggttgtcactgttgttgaagttgatttcttaacaggtactcaaaaatggtacagtgaattatttgatgcagttgtctgtagtgttggtagattcaatgttcctttcatccctaatattgaaaatcttgatgaatttaaagctgctcatccgggtgtcatttcacatactaaatcttatagaaactccgaagaatttaaaaataagaaggttctattagttggtggtagtatcagtgcaattgatttgttacaatatttcttaggtagttctaaggaagtttggttatctactaattcttctaatgttgccgcttctgaaggtgatgactggatcagtcaaatcttaaatgacaaatcattatcaatcaataaatgtccaagaattaagaaatttgacggtgataatgtgatatttgaagatgattcaactggtgaaggatttgataaaattttatttgctacaggttaccatttaacttatccattcttagatattccagaaaataaaggtaaaggctacatcagcattagtagtggtagggatgatcaaccaaattatgcgaaaaccaaagttgataatgtttactactatacatttacagttggagaaccaactttagcacatattggtattttacagaatccattattcttcctagtttctgaagttaactctgctgcaatggccggtgtatggtcaaactctaaacagcttccaagtattgaagaacaaaagaagtggtgtgaagatagaatcaaaggtaaaaaatcaggttttcaaatgtttgatgaaaattcaattattccatatattaaatcaatttaccaattcacaccacgtaatcgtttggatgttttaagtatattgaagaaagatgaagttttgaactctagaaaagttcttaaaactttgttctacaaatatgctacacgtgaacttgatgaaaatgacgaatagatgtattttttttagactttataatacatattaacattaaatagttataaacttttaactttctcttaaattagaatttaaccgtttaatggataagttgttggatcccaaccagtagtaagatattcatcctttgcatctaaaagcttgatgtcttccgcttccatcttaaaatcaccagcttctaagtttggagttaatctttcaatggtagtggtttttggtaacgtaatgaaaccttttgctaatgaccaattaattaaaatttgtgcttgagttttttggtatttttctgcaagtttaataagaagttcgtcatcaaatttttgacccttaactaatggagaatacgcttcaaccaaaatatcatttttatgacaaaaagcaacaagttcttctctagttaaccatggatgaacttcaatttggttaacgactggtttgtattttaagtcatcaaaagctaataattcttctaaatgaggaataccgtagttggaaacaccaatatttttaaccaattttgaatcaacagcttcttgtaaagctttccatgaaccatgtctcttttcagtgttagaacgtggagaatgcattaagattaaatcaatgtaaccaatctttgaagctctttctaatgataattgaatcgcagccttagttaactcataaccatgatcaacatcataaatcttagtagtgtagaagacatcttctctcttgttattagctggatcttcattgatccattcagagataccttcacaaacttcaacttcatttttataaacttgagcagaatcaatgtgtctataacctctacgtaatgcttctaaaacggttgattttgcaacatcattaggagttttgtaaacacctaaaccgatttgtgcaatcgtgttacctgagttaagagttaaatattcaacagccattcttgtttatttgaagtgattatgtaatgaatatagaaataaatagttaatacttaaatcaattatagtttcaattcattttattatgagtttctgctactctgatcgacaccctcgatgcggatttcatcggtaataaaggttggaggtgtgtctcaaaagggtgaaaatatatagaaaaccgggcatgaaaacgttgtggaaataaattttcatgttggtgccacagtttttaaaatttccaaatcaggaaactcaacttctcaatataatatttttccagcatatatcattgcatctgagaaatttatgatatctattttatatttatatataatatattactacatcgataagaaaaaatacttttgctagaaacctaacgggatcatcacagtggatgggtttgaaaaataaccaaagtaaattgtggttgtcagtaaagttttgagttttgttttgtcaaaatgaatggttattctggtactgtcctgtttaggatagataaaatgaaaaagagtaaagttaaatcatgttcaaattgtcgtaataggaagcgacgatgcacacgagaagagccttcatgtacattttgtttgaaaagaggtcttacttgtaactattcaatgtttaaagaacgtgaatctgatttgaaagaagctgcaaaggtgttggttactttgaacccaaataatgatcaaaatacatcaaacattgattcaaatttcaaaattatatcacattcttcaactgaaaagcatactttgctgggccacaacaacaatattaataattatgctgatccacgaaatgataatgataatcaacttgatgattgtagtgttgaatatagtgattttgaaacatataataatatccataataataatggtaagattgaagataaaatttcttgtagaaagcacagtaatgaacctaatcatgaagataacttaaatagaaattttagttcttttgttaatgaagaaacacattattcccatcaaacttattcatacatgcagaagaaacgtattgtggaaaatgaatcaactaataatgcctggcacaaatccaaaagagctcacgttgaaagttcttgcaaggaaaataaaagttcaaataaaacacatcataatttgaatcaggtgaataacccaattaataatatcaataataataatgtcaatacgagtgctgatatattaagcaatttagatccaactaaaagagtaggcccggtatttacaactttatttaattcatctatcaattcaaaagaaaggggtgttgaagtggatataaatttactattaaaatatataccagataaaacagactctgatatattagttgcaagatataggagttcagtacattcattgattcctgttcttgatttacaactgttttatccaatttatgaagaattctgggtctctaaatcaacgactaatttatcatttttggttattttatttacaattttttatgcggcatctgtatctttgtacgaggaaagaactatcaaaattgataaacatgttaacaaaaatgacttggtcaaacaaatgaagtattatatggggtgtactgaaattgcattatcaatggctgaatatccgaaaaaagtcagtacgatagggcttcaagcttcggttattctttacactttggttagaactgattgtcgaactgatgatttcttatctatttcatcattggtgaggtgtgctcaatcacttgaacttaatcgtgatcctagtaaatatcataaaattacggatgcaaaagaattacaactaagaaggatattatggtggcaagttttatacttggattgtacaacttcattatcaacaagattatcaccattgattgatgaaactgaattcgatacacaaatgccaaatgaatataaaagaaattacaatggagactttattttggatcaagctattgctttctttaatggtagatgcaaatgggccaaatgttgtagcaagattttaaaatatacatttaaaataaggcctagttcagatgttatgatgattaaaataacgagagatattgagcatttatcatttttctgttcatcattagttcaaagaatgctggatcctattaatattcagccaactgaggaaaaatttgtcactttttccactcttgttttgtcaactttggtggatagatgtcatatattaataagtattttattcaaagagaaagaggagattcaatcgactctagaaaattcacaatctaacaaattatatttaaacgaagttgatgacatttcatctgtctcagattctgttactgtcaaatttaatgaggatgttttggaaaatcatatccatttgttgaatgaatttatgaaatatggtgaaatgccaagattttctatttttatttgggaaatcagaaaatttcaaccaattcaaaccctactttcactacttaggtgtattattttggagattttggaatgtagtatcgatgataaggatcaaattcaaggggtaattgaaagattaaaaaaaagtaaaagtgtgaagattattgatgaatcaatagaaaaactatcttatttgtcagaacatactacagtactttgctctcaaagatggaatacgttgtttgaacttaaaaatttagcttggaatttgcttttcaaaaagaatgaaaaaattactaatccggaagtattgaaaatttctggtaatgatgctattaatgttgctgatgataatgattgggctgaattgtatagagatatgaatgagattgaaaatttgattgaggaaaatatcaacttatgtatttgggatgatgcttcggggcattaccttgtttagtaatttatagattaagttaaattaaaattgtgtagtaaaattttctttcgaagtacttctttcccaaaaaatttaataataaaactcaaagaaaaggttatgagaacaatttatttgaacgatatctttgctataaaaacaactttattaaaaattaaatgttatttcaactaattagaaaagcaattaagaaaaaaataaactataaaggataaataaatcttacattttccaaatcagttaaatccatcatggaaacatcaaccttttgtctgacaatttgtccatttttatcctttacatcaataaaaccataatctaatgcttcatcttcggaatccgcttccatcaatgccagtctttgtttatttctgttgtttaagatgtaacgaattaacaacaaggtcattggagcacagaaccaagaaaagacgatttgaataatccatgggactttatatcttggtgcaaattgtggtctccacatttgtggtgaaacaatattaccaataccataagcaatcataaacatagcagttcttgttaattttttggtgtaacctgcagcagttgcttgagataaggagaaaccgatgatatatgcagtaccatttgtacgtgtcatgaaaatacctgcaagtaaacctggtttattatcataactaattgaaattgcaatgattgcaccaacaaatgcaggaataatccagataacagcaacccaacaagattgtttcttgaaaaaaaataatgcaagagaaccacaaataccacagaaagttgagaaaccattttgaacaaccattaataacgtacttgttaagtgaccaaaacctaaagatgtgtaaatgatggaagattggtatgtcgtagaattttcaagcatgttcatgatacagaaaagaaagaataaccatgagataggatccttgatacattcaatgaattgatattttttgaaaaccttttgttcaatagatgatttagaagatttcttaattcttgaaataatatgtaatttttcttcagtagtgaataagactgaagtagctgggttatcaggatataggaagaatgaaaatattgaaacaagtgatgaaacaacaccaacaaacaaccagtaccatttccaaggtctccattttttagtaaattgtaaaccataagaaataaaaccagttggaatatcaatacctaaacaagaaatccagaaaattggattaacataggcttgttcctcaatagtaaaaaacataccaatagtatgttcgacacatggtgtaataccagattcaaccagacctaagaagaatctcaataaagacataccagcataacttttagaaccaagagtagcaaatgaaattaaggcccaaatagcagtagcacctgtaatatagtatgaaattggaactctttggaaaattaaatgtgaaggaatttgaccaactaaataaccaacataaaagaaagtttgaatattgttatatttagacttatcaatgttcatatctggaaagatacctaataaagaagcataactgacagcatctttatcaatgaaaagggtagcattaacgatgaaaacaattggaacaatagttaaccaaagttttctaacaagttttctttctttctctggagttaattcaggaatatcaccaccaaactcttgaactaatttaaaggtttcgtcagcaagcttttcatcaatctccttttcttttttattttttaaaacattttgaacccagttattggaagtagtagattctgaagaaggagtacttctttcagagaaatgagtttcttctttttccatgtttagttttctttttgtcaaataaagttttattaatttactaacattagtttccttatctaaatcagaagggtaaattaggatatttatacatatatatatatatatatattcaggatattttggattgggaatctatcaatataatttttttaaatctacggagaatgattaccaatttagtaggaatgaggtaaatcaattgtgtggctttcacactctcctagggcagttaccacagcatttatttcctattttgcttttgctatcatttaaagagaggctcaacggattgcagttactttcctggataactttttattttatggctattatttgtgtaactttaatctttatttactacatagaacttgacaggatcaatggttaagggtttatttgatctattttatttcaatttaggagtacatatatatataatttaaagctatttagtataaattttgtggagagtggaaaaataaaagagggaaaagacacagttgttaaaaaaaggtgaacttaaacaagataaagcttattcttgtgaaacccattcttggaattcaccctttgctggagtgtcccacatactaaccataacttttctttcgcctttccatggaagtctaccatgactaacaagataattattaacaataactaaatcaccttcaacccatacatgattatatgctttttcaattgatgctaataatgtaatatcaagataatcaactggaatttcagttccatcatcataacagatatttttagtatttgcataaccaccaatcttttccttaacatcaccgtagaaacatgcaatactattgtaaaaacatgggaattcttccttctcatccactttatataatctaattggtttagtgtgttgacgaactaataaatcattattttcgatatattgactatcttcactagcatattcctttgctaattttaatgcaatttttttcttttcttcaagagattgtatttcttcattaatatcacgtccaaaacaaaacttatacgaccaatgagtattgtttttagtattctccttccaaacttgttccatatataaaccatccttacttaatcttttaatatattcaggtgctttatttttaacttcctcaaaaaattcaccgccatgaacaatcggagtttcaccaccttctgcattcattttactacaaacaaagaataattttgttggatattttgcaaatcttgaaaattcattatgttgatatataattctatcaggtggaccttcattcgcagtacttaaaatatcagtaatttcagttctttgagctgttgaaccattttgaacaaatggaatatcaccagattcatatccaatagctttaatatattttgtaaaagtttcaggatcttttgcacctaatccacgtataacaactgcaccattctttttaagtaattcattgaaaacacctttctttgcctctgattttaaaaattcttcagtttcttcaacacttgcaactttatcaggtgtaaatgcaattggaaattctattcctttaaaaacatgtttatttggtaaatttattttatttaaaatcatttttggtatctgtttttttatcagtattcttagttactttgattatagatactaatttgtaatttatatatctacagcagtaacaactaatttcagtaatcgtaacataaattcctaattattcagttttaatacctttgacaagatcatatctttgaaacttttccttcggaaaatgatttcttaaaaaaatagttttttctaaaactgtggcatatatatcaaaaagatcaactccgtaaaacatttgcaacttccgttttcaaaaatcactcttttctctgcggagttgagatatcagtggtggaaattaaaaatacattaaagccattgtattttatattaagtgatctgtggaagggctattatttaacgaaaaatatacaatttccataactgtgcaactccactattaaagctgttaagattattatctttttcttaaagcggatatatttttttccgcacccttcactttgggtgagccctattttagccttacttagtgttatactattgacaatgataataaaccctataatgattaacttaatggtattgtaataaaatgaagaagttttaggtagagttcactgtttttaaacatttttaaaaaagattaaggtaaacaaaacaaaaataaaacacacggttaatatttttttgattcttaaaattttgaaaaatttacaaactatatattcatattgtaaaacacaattttttcagctactgctgattgattgaaccaatcaatatatatatttactaatttattatgttattaccatcatgttttttttttacattaatttcattaaaatatacaatattatacagaatgattacttatacgcatatattattcatgctttatcaattcaatatattttcatatactgaactaaatgtaaattatttctgtttgatcacgtgacatttgtttcacacaacgtgacaatacttagtgcaggcttaaaataacaactaagtggtcggatggtctagttggttatggcatatgcttaacacgcataacgtccccagttcgatcctgggttcgatcatttaataattttttttattttttcaaattatttttatcaatatattgaagaatcaatattaccatctttaatgctaataaagttctatactatattaattaactacttttttttcaatggtatattaattgatataaaataatcttttcaattttataaattaaagtttttcttctaaaagttttttacaattattaacagattttgtaagtaatctacctgcaatactttcaattggtggaactgaccatttatcaattttattatcatcttttgataaaataccttcaataccatttaaaacattattaacatctttaaaattaaaccattggacttgatctaattctttatctaattcagtattaatatttgaatcattaatttgatcatttgttaaaataccaatacaaccaatcattaaatttgaaggatatggccaaggttgactttgaataatttgaatattctctaattttaattttaatccagtttcttcataaacttctctaacacatgtactttcaattgtttcaccaggttccataaaacctgcaaaacatgaaaacattgttttactaattataatttcattaccagttttttcatcaagtaccttttcaattgttggtggatgtctctttctattagcacctaataaaattctaccattttcatcagataatgaaataataacaactggatcagtacgtggaaattggaaattatttgatgttaaatttgccttacaaatttcattatatggtgaatcatttaaacaatgtaattttgaacctaattgaacaggtactacatgactaccacatgatggacaataattattcttatttaaaaattcaataaacattttacaatatgaatatgcacttgcagttggattatcaataactaaaacatctttcataccatttgaataaaaatatttattattactcttttttataatttcttcatcaacgaatgaagagagtatttcagatttagttatatcaattgaataaattggattttcattcccattaatgttagtgaaaacattattatcatccatacctaaccaaaaaagtgaaattttatttaattcatcattaatttcattaatttcattgaatttaatagttgatttttcttcatcaatttcttcttccatacgtatattatatttaatccaatcagataaaatttgcttgaaaggtggataatctttaacattcaatggtattaattcatttttattattatttgaatttaataaaacttcaagtctattaacttttttgaaaattattaattttgacttatttaaagaatttaataatgtttccatatgtttagcatctcttcttaaatacgcatatctcagtatatgtttattactaccaaagaatatatctttcataatgtaatttgtttgattcaagaggagaaagtatatcaagttaagcttagtaatcagcgatggagcgagtgggaaatgtgcatgaatttgaatgattcacttaaattatctccgctgattagtcttcagattttagattttagattttagattttaatattaaatattaagatgatgatgatgatataaaaacttgcaaaaatatatataatagacaaagattttacacttctctatcacgtatatatatatatatatagtagtataaaaaaatatgtatatggaacatgagtacttgttgaaacaacaaatatagtacgatcaaattgatcaataaaataccttactttaatttttttattcatcagtaattaagatatataatatatgcatagctagttttccaataaatgaatttggaaatttcttatatttttttattaatcaagttacttgcttgatattgacaagatttatgatcgtttatgaattttaaattggaaaaatttcataatttattattcttcagttagtcataaccaagcaggattattattattattattatttgtattattgttagcatttgctggagaatttgaataaacatttttattttgttgaacattagcttgttgttgtccctgtccttgcatataataataattattttgattttgtgttgcttgagattgttgaattctataagtttgttttaattgattattagcttcaatatcaggaacatgaacagcttgattttgttgttgttgtaaaagtggtttaacttgttgagatgtttgttgagtttgaacttgttgttgttgattatcttcaacttgattattttgtgcattagctgttacttgttgttgttgttgttgttgttgagcttgttgttgattttgttgattttgaacagtaaatttataaattgtccaatcaaagatataatcataaacatatttatgtcttaaaaataaatctctaaaacctcttctaagataaatataatcaggtttatcatcaaatcttaaagatctaacataattaagataatgagtaaattcatcaggtaaaccttttgttaaaacttctgcaggtattgtcatttttctttctaaaattctatcatatttttgtcttttagttgcagcttttaaaccttgccaaggtaaagtacctctaaggaaataaattaaaacataacctaaactttctaaatcatcccttcttgattgttcaatacccatatgagtattaattgaagcatatctagcagtaccagttaaatttttattttctctataaggtatatgaatatgagttcttggatctctaaattttttagctaaaccaaaatctataacattaacttgagaaccttttttacctgcacccattaaaaaattatcaggtttaatatctctatgaataaaatttctagcatgaataaattctatacgacaaagcagttgatcagctaataaaagtacagtttttaaagaaaattttctattacaataaccaaataaatcttctaatgaaggacctaataaatctataaccattgcattaaaatcacattcagtaccataccatctaaggaaaggtataccaacaccaccagataaagctttataaacttttgcttcatattctaattgaggatgttttgctctaatactttctaatttaattgcaacttcttcacctgatataatatttgtacctaaataaatatcaccgaaagaacctgaaccaatttttttacttaaacgatattttctaccgactcttaaatcgacattaacttgatttggatccatttttttatttctaaagattggaatggaatggaatggaaatgggaggttatgatataaatgagatgattatgataaaattttaaattgatgaaggatatattagtaataatatgaaggatggtaatataataaaactaattatatatactttactactttggatataagtaagttaatcaataacagatataattaaaagataataataataataataacagtaaaatcaagataataataaaagataaacagtttttgttgtatccctttttttcaatttcaattcaattcaatttcaattttattcacctctttctcactctctttctctttctcacttgaaattgaaattgaaattgaaatgaaaatttcttattgaaattatttatcgtcccatcgtcccattatcagactacattacgtaagtatattaatatttaattataattataatattaaattgagggtttccttaatcatttcagtcttccatttaattccgtgattgtggagtcattttcacttaaagttagtatactatactattgttattttattattaccattatcatcttattattattactattagtattagtttcaatctatttgtatactatactacactacactatactttactactataaataaacaattaattcaaaaaagggtagcaacaattcaaagatcatcaataaaaaaaaatattcatcaaatttactaccgaatacaatagaatttcttggaaaaatttttttttttaacattttaaggtttcatattaaataaattttttttttgttattgtttgagttctatttttgtttatgttttctttcaacagttatattgatatttatttatgatgacattataattataattataaaaattataataagttaatactttaactgtcaaagtaaatctatttaaaataactcatagttcactataaataactcaacgtttccccccttttctattttttttaatatcatcttgcatattgtcttatctttctgtatatttaaatatttacttttcttttcatttctttttctttcctttattgtaaccatacaaaagtaaattaaaaaaaaacatgtctactgaaactcctgttgaaacccctgttgaacaacctgttgttgaacaatctgaatcaaaatcatttgttgaatcagttaaatctgcttcaaataaagttgaagaagaaattaaaaaaggtgctgaaactattaaggaagatactaaagcaactgctgaaaaagttgaaaatgaatttaaatcttcttcaaatcctttaaagaaagtttcaaacttctttaaaaaaattttcaattaaggaagtttatcaaaatttacatctattatattattgtaacaatactttagaaaattttaatctaattttaattttattctctttctctttttaatttccaatttaatactttttttaataaataataatatattcttctaatgctatataataacttaatacaataataataataataattttagtactttaacattctagcaaaaacgcctcattcttatcagattaaacacaatcgtgtgacacaccccttaagtcatcggctttgttttttcttgtcactctaatatggattttatctttaaattaatcttctatataattttaagccacatgtaatcacacctaaaatatactgttatcctgatcgtaatctgatacaactatacttattaacttctacacaaacatgtggtagcaaactatgcactttataaggtgcttaacactttatcttttattacgtaataacaattgcatatcaactcttacttaattcacaccccatatatagtatatcaggtataaaatgattatttagtcatttatacactacctcatacatttcttaactataataatcatatcattatatacagctaataataggaataactgtataatataccatagtaatgactatataccttagtatcccccattaaatagacgcgccgttctgccaattttaaattacgtgtaaattttcaattaaatttcaacattttttttccaacatgaatttcttaatgaaatcttacatgaaagatagaataatttaattaacattttatcacttaaatatcttgtttataaaccaaaaggaatgcttgcatttagatcattatctgcacaacgtgctttttctacaagctctattaatttagcagctgcagttgcaagaaaatcttttaataaaaaatcatcatttgataaatcaaagaatagaaaaggttcaggtaatgataaaacttttaaggcaacaattttaactaaaaattataaaaattctgctaaaaaaattgatgaattattaattgataatttaccttcaattaattccgaaaatttagatttaattaaaaataattttgttaaatatccaattgatgttataaaaaaattacatattgcaggttcatttaaacctgatcaatttaatgaattatattctcaacctttaactttatttcgtgaaattgaagattctaaattaattgaaattattaataattctaaaacaaattcttcattaacaaatagatttattattaatggtcaatcaggtttaggtaaatcaacaattttatcacatttccattcatttgcattatcaaaaaatgaaaataatgcaattcttttcccaatttcaaatgctgatttattagttgatggttcatctgattataaattaaatcctgaaactaaaaaatatgatcaaccaatgtattcaaaaacttttatacaaaaattcaaaaatttaaattctgatatattatcaaaaatacctttatcaaatgaaattattccaattaattctaattataaaccttcaaataataaaattaatggtactttattagattttgttaattattcattaaaagcatcagcaattgaaactaattcaacttttgcatttaaaactatacttgaagaattatcaaaacaaactgtactacccgtttatttaacaattgataatttttcagctttcattcaacatccattaactaaatatagaaatactgataatgatagaatttatttccaagattttacaattgctgatttattattaaaatttgtttcaggtgaaaaatcttttgcaaaaggtgcagtaatggttgcaacttgtggtaatcataaattaaagagtaatggtacattagatgtaataacaggtgataaatcaattgatgaatttgcttattcaaaattaaataattttgattataaattagcaaatagattattacttaataatggtattaaaaaatttgaattaaataaattttcatttgatgaatgtaaatcattagttcatcatttatttaaatttaatttagttcataatgaatatgatttagaaaatcaaatttcattaagtaatgaaagtatagtttatgataaaattgcagctcaaaaatatttattaagtggtaatggtaacccaagattattaatgaattcttgtatattatcttatgcttagttatttagtactttacttaaccttttataaacattaaaatgacttgtaaatataataatttattgtaattccggtttacttttcgtttctatttttattctaaacattcatttatatgtgctattaatacaaaaaatctatctatgcttcaaatccatcagaatgataaacatcatcttcatcatctacaggtggtggtgcttcattattaattcttttatgattttcatcatgattttcatcttcaatctttctcttatttgtcggtatactatgatggttaggattatgatgagattgttgttgttgttgctgttgttgataatgtctttgtttattcttttctcgagtttcccaatttttcttcattttaggttcaagttcaattaattcatctcttgtaactgaatcttcaattgattttaaaatttttaaaacaacattaatatgattaccatttaatttatcatctctaaatcttaataattcccaaacttcatcatttgtttgtctacattcaccaattctaccattaaatgattcaccagattttttcatttcttcccattgtttatcacttacaaataaatcatcataaatatcataatttacaaaagaatttttatattcaccaccatttcttttaatattattttcaatactttcattttaaatggatcatcaccacctttccaaacatataatttaaattttggtttactatcataatcagtatattctctatttggatcatgttttggtaatgaatcatctaaaacttttgggaattctaaaccaattttaaaatcaattgtattctcttctgcaggtttccattttaataaagttggatcagttcctggaatataaggtgaatcacacgaagttaaaattaaaccatctgaaacataagttaaatttttcatttcattgaaaattttatgaattttgaaaggttgtgtcatatttttaaaatctaatttgaaatgaccaatttttacatgcatcaggaaatttcctacgtaattcattataaggtaaatgaaattcttgttgagcatgatataatcttttataaagatttttatgcattacactttgcatatccattgaaagacaatcaaatattaaatatctaacttctttaattttagtaattggatttaatgaataaactaattcaccatcaattattgtaccattatgagatttatcaaaatctttaatacttcttggaaatggaaatcaggaacgtgataatattcattctctcttgaaattaaaaatgtaccttcctcatttgtatcgggattaaccaatacaaataataaaactcttaaaccatcacttttttcacaaactaaataatctctctctaataaatttttatgtaaatgttccctagtaaatgaaactggttgagaacctgggaatgaattatatcttgtacgaagtatcattgtaacttgttgtttgagataagtttccacatctggagcacatctcttccctggtatattgggcacacctctatcagccattgtctataataattaactattatacctatactaacatgatttcataatgtgtacatcagagacctgtaaaaagagcattaaatacaaatttgggaaatttttcaatttccgcaccagtttcctaattaggacattttttaagaggaaggtgaaagttatttgaaattgttaaaaatacagtacaagttgtattgcaaattgttgtattttgctttactttatatgctgaacaactaactaggaattgaatttttagctttagtatagtttatttgttttctttgtttattgctttttcttaattaactacttgcttatttcctagtaaaagtattcaaaagttttaataatgtctgaatgcaacttctgaaccaataatggatcagaataatgctgcaattgaaaataatcatgaaaatgaaacagaaccacaacctgaattacaaattgaaaataatgaaattgacctgatacctgatgatcatgaaaataatgaactcgataataatgataatattaaaaatgattacagaagaatttgatgatgatcttgatgatttaatgaatgatgcaattaatacaattgtagaagataataacactaatgaaaatgaaaatgaagatgaaaatgactctgattctgaatccaataccaaagatacaaccaacagcatctttctcctcatcttcttcatctgcaagacctaaaagaaaaaatacaaagaatgtaaattatacagacaaaggaccatcatttactacattaaaagttgaaaacaaacgtggttcaaaatcacgtcgtggtaagaataattcagattcttcatcaccaggtccacaatctactccttcaaagaaaatttcatattatgatgttgaagatgttgtaccaataaattatcaaccaccaattttatcaaatgataattttaatcaaattgttgattttaaaaatgcaaaaattgataaagatgaaatatcgattactttaaagaatggtttaacaattaaaaagggagattgtatttatatgatttgtgaacctccaactgaacctttctatattgctcaaattatgggatttactaaaaaagataaaaatgcaacaattaatgatgaatcaaattatatgttcagtgtttgttggttttatcgtccaagagatttgaatagaagaataacagatacaagactggtttatgcttccttacatcgtgatgattgtcccttaacaagttttagaggttttgtcactgttaaacataaatctgaaattcaagatattgaaaattttaaaaagcaaccagatagtttctattttgataaattatatgatagatatatgattaaaatgtatgatatgataccaactattcaattagttcatttaccttcaaattactataaagcattacataaaagatttgaatttatatttgttgaagttggtaaagccgatgaattattaagttctcctaaaaattgtgaaaaatgtttacaatggtcatcaaattcagatgcaattatgtgttctggttgtcaaaaatcttatcatttcttatgtttagatcctccaattctaactaaaccaaagagaggttttgcttggtattgcgctgcttgtaataaagaacttgaagataaacttgcagaaagtagagggaaaatgttggaaagttcacaaccttctcaaattatcaaacaagaaaataggttagcagtgatgaaagaatctgatcaagatgaaagtgaaaataatgcttcaagtgataatgaagaagttaacagtaataataaaaacactaataatgattcaagtttaaaatatgaagaaatggcaaagaaatttttagaagatgataaaaatattactttgaaaagaagaagagaaattgaagaatggccttatagatatcttggtgtacatgcaaaatttgaagatgcattagatttacaagatcgtccatatgcacgtgctgcttctagattaggatcaaaatatcaatgtacttcaataaccaattggtatgatcacaaagtacaatattatgacactgattctaaatcattaactaataataaacgtttaaagaaatattacaatcgaagtaaaaagtcaactactccaatacctgatgaagaagattcattacaacagaaaaaattcccaattcctgatgaatataaagatgttaaaccaaaagatttcccaggttggttacaaccaaaacctaaaggttatatagagagaggtactgatgaaactagtacgttattatggaaaatgccaacttgttcatccggtgatatgagattacattatgaaaaattagttgatgattatattaaaaaatgttcaagtgttgctcaaagattaaaattaattactgatacaactcctaactttattgatgctattttacttattttgatgagacatgattataaacctgaagaatgtatggatgatgtgaacaaattaactagagaatcattgaaagaaccaacatttactgatgaagaagttaaaagatttgaagattctgtcagattacatggtagtgaacttttcccagtgtttaaagatgttagaacccaaccttgctctatgattgtcagattctattatttatggaagaaaacaaagaatggtcatgaaatttgggataattttgcaggtagagctaagaatagattgaaaaatactaaaaaagttggtgttgatctcgataatcctgatgatgatggtttgttctcttcaactaaaagtaataaaaataatgtgtcacttaaatgtatgtattgtgagacaaatcatagcactcgatggtttagagcacctggtgctatctttgatgaagaaaaaaatatgtgtgaaggtttatgtaatagatgtgctaaattatggaggaaatatgcaactaaatgggagaatcctatcgaattaattaaaaatcaagagaaaaaagctgcctatgctgtaaagaagaaaacagaatatgcattaattgaggaagctgaattagttgttaaggcaagagaaaactataaattgaatccacttcctactacttcacctttgaaaaagtttaaaaccattgatactgattataattataatacagatgaagaacctcatgttgaagtaacaaagaaaaaagtatcgagaaaaaaaccaaaggagctcaaacaggcaccaactacacaagatgcacaagtgtcatcaacatcaaagaaagtgacggataaacttgtaataaagagagaaagcaaatctaaaggcaaaactaaagaacaaagggatgctgaaaggagtggaataccggtggattttgctgattttgttgcaaatggatttactaataaaagtaaaaggaagaaacgcacaaaatccggagagaaaggaaccgatgaaaatgatgaaactgttgataagaaagaacttgttcatgatgataaagatcataaagatgaagaaaagcttgaaaaaattccttctgatgaaccagtaaagaagaaaagaaaatacatcagaaagaaacctattaaagataatgaaataaagtttgtttatggtaaagttgttgatgtttttgaaggtacaaagaaactgactgtgaaaaagagtgaatgttacgatccatctgatgattcaaatccttctgaatatgataaagctgttgaaattgttaataaaattgaagaactcaaagctgaaattgaagaaaatgataaaagtaatacattcaatgcatttttagatatgaagttaagagaaaaattagaagttttagaagaaaaattagcatccttaaaatcaatcaaaacatctaatgaatatgaaaaagttaaccttgagttatctggtcctaattcaactccaccaaaaagtgaaccaacatcaagtagaccaacatcaaaggatttggaacatacatttccggccggtaaaagatatgttcgtagaagagtttttctttctaaagcttcagttccaggctctggtatatttgaaacaccacctattcaacttccaatgatggatttcaatgcaccatctgatgatcttatggacttttcaactgaaaatacgaaatatggaatttcaaagtcaacctactgttctgttaccctaaatcattcccagttggtgaaactactaaaaatcctaagaaggtaaatagaggaaagaaaagagatagaccttataatcaattgatgaatattttaccaatggcgaaaggaaatggaaatcctttattactatctgctgaatctagtaaagctccagcatctgccaattcatcttcaaaaacagcatctgaagttgtcaaatctgttaacacattctggatctataagcttctaatggcaaacaagccaactgcattccattcatcaaaatcaccaagtaccatcataacctcatttactattaaggggaagacaatatcttgcattagttgattcatccgaggttaaaccacttcttactattattgactgtactgacagtataagcaaaaggcttttttcaaggtatgttagtaaattcaatatctccaatccattgatctcagagaatatatcatcatcaccattatatcaactcagaccatcaagtaaagaaattcaagctgcttggaaatatttacaaacaagcaaaaaaacaaaagttaaatttagctaaagcttttgaaccattattccctcctgatagtagaccatgttgtgtttgtagagaaatgggtgatgtttcaagaatgattatatgttctaattgtggtttaaatgttcatgcctcatgctatggtgtggagcttccttcaaagatgaaaagaaatgcaggtgaatataattggcattgtgatccatgttcaaatgatttacatgttttggtatcaactcaatatgtctgtatgttatgtaattcaagagagtcaaatatggattcagcaatcaagggagatccaatttcaatacccgatgcattaaaaagaactgctgaaggtagatggtgtcatgtttcatgttcgttactgtgtgatcaaattaagtatggttcacaatctcttcaaccaatttatggagcttcagttacaggtcttaagaatgttctcaattcatgtaaggtttgttgtaatatgggtggtgcaattgttaattgtgatttctgtgctactacaactcatgtaacttgtggtttagattttggatggcatattggattcaagttagttaatgtttttgatatagccgatggtgacgttgttgaaattgcaaaggataaagctgttggtaaattagtacctattatctcttgtgaaaaacctaacagtgaaacaaatggtagaccactatattatagtttttcagatataggtagaaaaataaatgttgaaaatggacaatcaagaactttgatcgagctttatgcatcagatgaaagaaaattagtcgatgatagtgccaacggtcttacacgtagaaaatactttgataagctattaaacgagtttgatgatttggtatcaaaagctaaattgaaagttgcgaatggaaaagctcctgattctacatcattagaaaatgttgcttctgaggctagtgaaataggcatagtcaatgttgaaggggagactgaacagaccaccgaacaacaagttgaacaaggaaaaccagaacatgtttgtactcgttgtttcaatacttcaagcttattatggtatacaaaggtaaatcctgaagatggtagtactgatgaagagtgtcatttatgtcataataaacataattacaatgaagataactctaagactataattccacaattaagggaaattaataattatgttttcgactactagtatataagctctttataatacatttgaaatgatacttttatatttaatattatacaatctatgtaatagtccaggttataaataaccacgggttagtatgtcctcgattctttgtatttcctctaatgaatcagcatcctcaagttgttttgctaactcttcacgatcttcatcagataaggattttttactaggtgtactagtctcgtgtgaagacagcgttatgttattgtttttatgaatggattgattagaacccaatgataatattgtgtcgaccttatgaggatcatcagtgaaaagttctttagcttgttgtcgttctgaatctttcactctttcaaaatctaaaacttgcaaacttgggaatctccatatgcaccataatctataatcactgttcttcactattggattgcctgttaagtataatgcacgtaatgaaggtagctctttcaaattttcaagatcggaaatgtataaaatatcgttgaatgttaatgacaaacactcaagattcacaagttttgataatcccgatatgtatcgtatatgattgttagataataaaagggtgtctacttttagtaatgaagggaaatctattaagtaaacaaggtcatttttactcaaatcaattgtagaaaatatatctgttgattcaagagtcttaattgcatctagggaactaagatgaagatttcgtaaggacaaagatcgagttcctaatggagatataaaattcggagcttctatcagtattccctctgtcaatttcataatatgtaattggtaaataaatttattcattcaaaagacttcattcacagcaaaattaagaaaatggtgataattaaaaaaagagtgaaaattcatgttgcttatgtaatgccttagccttagaactcaaaagataatagaacttacgatagtggtagttacaaataggagaagctcattcttgactatatacacaataataatttaaaaaggaataaaactaatatgacaaattctagttaacaggagaacacatttggaaaaatcattcttcaagtgacaattgtgacttatgtgaaggtaaaattttaccattttctggttcatatttcatcttagtcatttttaataattgttgtttatcttcttcagataataaatcaacagtttcatttggaccaacaaattggaaatcaccaaaaccaaatgcacggtcacttatattatcaagaacgtagagttgcattctgatatatctgacaattgcttcaagtttaacaatatcaatatttttatcaccattaaatatatttctccaaactgcagcagctaaaacatcatcattcttttgcgctaatgcttcatcaagggaaaaaatcataccaagcatttgagagtggaaatctttcatataagtatctctaattctaccacttaaaacattcatttcttcacttaatcttaattcaatatctttgaacatcttatcaactaatttttgttggtaatttttaccaattttgaaaggcattgctctcatacgtacaaataataaccaaacatgtaaatttgtaatttgaaaccacattgcaaatgttcttggtaatcctaatgtttcataccagaatttagctgtttcacttaattcttcatctgtaaattgtaaaccttgatctttacacatataatagtatttagaacctgaaatggtacctgcacgaacattatccatatcaatgtgaaataatgaaacaaaagtttcaccaaatgctctcttccaagcaggaactttaaaaccttccttttcatatgctggtttctctaatttagccttagcacttatatctctatttggtaaatcaggattatctattttaggaaaatgagattccttaactaattcaacaggtgatggagctttggtttgggtattatcaacattggatggattagaactagtaaatctctttgcaagaaaaacagtgttgtttcttatttgcctctttccaacagcagagagcatcttgtttattagttgtcaaaagagaaagaatcaagatagagacagaattgcaacaaatcagatttctttcatttcaaaatgtcatgaaaaatttcaaaatctcattattatagaagcacctagtaaaatatttctaagcattgtttctctcaatattatacatcttctttacataaaaaagtgatactgctcctcgtgtcaccaagacattgtgtgatattaattacagtgttaatattgtacaattttatatataaaagttttattctatatccaataaaaaagagggtactttttcaaaaacaatctttaaattttacctacgaccacgtcctttacctttagttgttgtctttgaacgtgttttacgtcctttgttggttttcacagcaacaactttcggaccttcataatgtgtatatccttgcttctcaatagcagaactattgacccataattgcatgtttctgatacgatcttgttgttccaaatgattgtagacacgacgtgctctatcaagtaatttagcacataaatcagtaggactttcaggacttggtaattcccttaaacgtaccatcttaataacttcttcctcatctttatcataatcaatatatccatctctatcaacttcttcagtatcaacatccatcaaactttcatcatttggattgacttcgatactatcataagtactggttctttgtctttttctagttcttgtgtaagaatcttcacttatctaaagaacgagtagcacgtctactagatcttgtttcacggatagtttcttcctcatcatcagcttcttcaattgcttcatcctttgtctcttcatttatttttacatcttcctcattatctaaagcttcttccttatgttcttctttgaccttagtttcctctttattcaccacttcttctccaaactgtttattttcaagcttctttatataatcaatcaagctcctctttctttcatcaccagcaagaaatttcaatctagccttaaaactattaatgatacgatttttacaatcttttaattctttcttcaatgctctttctctggtacctttatcctctaaccaaacgattaaatcttcaaaatcttttacttcatcaatataagcccaatcattttccttcttaagcaccatttcaccttcctcggctacttttcttttcaaaccatcttcatcatttttcaataaatgacgttgatcgagtacacttggaccttgaacccaaattctacccattaaataagtttcagaatcatattctccatcactttcttcttcttcatgataatcttcatcttggccgttttctccgccattttctccacgtaaaccagaattatcatcaccatcttcttcatcttcttcgtcccctttattaccacctaaattaggtaatccatttctttcaaaccaccaatatctattccagaatctatctctacctaaatatctaattctttgagtatttaattcaactaaagttttatcaatttcaattctttgtttcttcaaatcatcaacctccttgattctatcagatcttgtgttaagtaatttcaaaaagtcgagattgcttgccgcaattgctttttctaatgaacttggctcggttggtaaaaagttttgagttggcctgccgcctttatttttagattcataatatttttctttctcttcctcagttttcaataatgataactccatctcttcaactctttgcttaatatctttgatatcaattgttctttgaaactctaaaacttccttattagcagcatgagcactttcaattttaagtttgatctctttttgaatttccaatttttcacgacgtaaagatgcagatttatcaacaacagtgatcaatgtgttgtctgattacattaccatttaataataaattcattaaaattgataaaattgaaattctttgatcaacacttactttttcataaaagtttattttcagtttctctggagttagtgtatcatcatctaatggtgctaacatttcgtaaactttaacaatatcaggtttaaattccttgatatattcagtagtagagaaaacaccaaacaaaactatcaaccaactaccattcttaaaatctctcttttgtaatctttcacgccatggaactttcttgtaattgagaatagaatatgcattatgattgatgtcttcttgttcatcatcgtcgtcactatcttcgtcatcaccttcatcctcatcatcaccatcttctccatcatcatcatcctcttcttcttcttcttcttcagcttcaccttcatcttttatctcaactgaatttttagtttctaataatttcttttgtttctcctcttgtttcttcttttccttttcttttaataatgctttccttttaattgctctttctttcattttaatatctctttcaatatccaatggtaaattcaccaacatttcacctttctcattcataatacatgataacattgaacaaaagatttcaatgagtaatggacattcctcatgttgaatcttttccattgaatagcattaaggaaatcatcaaatgtaaatgtatcaatgactaaagcttcatgaaacatattaataaacatccaaacttcaagcacattggatagagtaattttcttatttgattcaatatcaagaggtaatttttcaaatcctgaaagttgtttccatttaggtctttcaattatcatctttgaaaggtaataataaatcttcaaggataattattttatgtgattttttctcagcttcttcatcctttgtttcagtagttttatctgcatctttgttatcatcgtcattaagtatatctgatattttattctttttggattttttaccatctgtacttttatcattcgaactatctgtcaaattctttttaccctttcctctagtttttggctttgctttggaatttttactattatcctctggtgcaggtgcaatattaacaaatccatcagcggatgcttgattttcaacgtcactattgttttctgttatttcttccactttcgatttcccctttcctctactcttaccctttttgacaccattaatttcatcatttccagcagatgtttcatcaattgtttgttgcttttctaattgataaatttttctatttgaaatttttatacttttgaaaaatctttgacatttttcataatgccaaactttaatccttttaatatgaacataatggaatggatcagtatcaggatattcattctttgaaaaaaattgacgttgagttataataaaatgagtattatttggatcaaatgtatcagttactgtaataccacaaaatttaaataatttaataactttatcccttgatttatcttcagttaccatatcttcaaaatatgctgttgtacgtttaagaattttataccaagattcacaccatttaatgttcatatcttcttgagttggtggagtttcctttaaattttcaaaaattgtatgtgaaaaacctcttgttgatttcatacctttctctgtacgtggtttacgaccgttggatgttgattcatcatcttttaagttattattattataattatcatcatcattatgggcatcgactgttaaatcattatcaatttctgtatcagtatcattttcatctataccattattatccatactaacatcatcatcatcattatctgcatcattatcaatattttctaaactatccatattttcatcttcatcatcatcatcatttaaaatattaacttttctcttcttttgattttttgaattaatgtaatcaaattttttcaaatgacttggccattctaatgaaattttatatttttgagcaatatcatcacgtataacccaaggtgcacctaatctatttgatctaactaaactaattttaaggaatgttttaacataagatttagtaaatctatttctttcacgataaattgtacttgcatcctctatatcaatttcattaccatcatctggtaaataaactctataagaaataaatggagattttaaaaccccatttgaatcaattcttgaattgaagacaactttttcttttataattccatgagctcgataaccatttggatatttaacaataactctatcaccggggaaataatcatctttaaattttgtataaacttgatcaactaataaatcaattctaggtacaattgagaatgaaacatgtcttaaaattggttctttaactggttcagggaaattagcttgcattgataataattcattatgttcaacttttaaagcttcaaagaatgtaaaattagaattaccacttgtctcacaaacaaactttttaacattataaaatgatattctattaagataatcttcataattgaggaaccattcaccagtttcaggaattatccaaacaggagtagaaggatttgcatctgctggtaataaaggtggttcaataagtgtaattggtttacgtttgaataaaacctagagtaattaaaggaaaaaaaaatttaatgttagtattttgatcattattattattgataaagcaaaattacgtgtaacgcaacggtttaaatcagtgaaatttcggaataaattgattgaaaacgtaccattatctgactatgaagtgtattagataattgattaacaaatgaaaataagaaaagaaataattaccacttgtttataaaagaaatgaagataaacaaactcccagagaaaaaatggaaaaagcaaattaaaagttgggaaaccaaaacgtaacaaaataaaaaaacatttcgtattttattaatctgagattacattataaactttatttttactgaaaatgtatttatatttcactatgtacaggtatatattattataaactacattatttatttatataaccaaccgaatgaaccattcttcttacgttctctaacttccttcggttcataagctgcaacatccttagcaattttttcaactgcaccttcagcttcataattacgtccaaggacatcaataaattcaccttcaggatccataagataaaagaaaattgaatgatcaactaaataatcttgtccaggttttaaatctcttggtgtactaaaataaactctataatttctacaacatttcttaatttcatcataatcacctgttaatccaataatatcaggatgaaattcacttaaataatctttaataacttcaggtgtatcccttgctggatcgcatgtaatgaaaattggttgtaattcaatattttgtttctttaaattatctaacattaaacctaatttatctaattcatcaggacaaatatcaggacaatgagtaaatccaaaataaataatactaaatttaccaattaaatctttttcagtaaaaggtttaccatcatgtgtaattaaattaaatggacctccaattaatggtttaccaatacctctatttgcttctgcttctttacgtaattttaatttctccttttcattacggaataaatatgttaatccaccaccaactactaagaataaaacaaatgattgccatgaaagaaattcaactggtttcttcttcatagtttgtgatgaataaccttcctctccaatcggtatacttgataatggtcttcttgaatattttttagttgttgtttgttgttgttgttgttgtgatacgggatttgaattaatttcagtagttgattttgcattttctggtttagtttcctttggattcacattaaggaaaaatctagttgaagagaaagctctttttgagatgatagatctagctaacatgatgtgatgtgtagtgaatcaatggctcttgtaatatgaaaaagacatgcatatattattaatgacttatattaaccctctattattaacatgcgcaaatttaaatttttcactttattacttcagttaagttaagttaagctaaattggattaatttaaattaaattaagttaagttaatattactttatataaaagatacgctatttagaaatcactagaaactaatttttacctgcaccagctctgaaataaataacatcaccatcttcaactgtataatctttacccttttgtaataatttaccagcagctttacatgcagcttctgaaccacattcaactaaatcatcaaattttaaaacatttgctaaaataaaagttttcattaaatcagtatgaataacacctgcagcttgaggtgctttagtaccttctctaattgtccattctctaacttcagttttttcacctgctgtaaaatatgaaattaattgtaatttctttctcattaaagtaattaattttggtaaaactgatggagcaccaattttcttttcttcttcagctctttcttcatcagtttccatttgtgataatctttcttcatatgaaacagataatggaataattgcatcacctggtgaataagtatcaacccattccttaattttaactaaccatttattcttcttacgtataaaatctttttcagataaattaattaaataaattgaaggttttgcagttaaaaggaacattgaattaataatttcaacttcctttgcagtccaattttgatttgcaactctttgaccagattttaataattcaataattttttcaactaaaattgcttcttctttcttttgtttaacttctaaactttgaccacctcttttagtaattttttcaattgcttctaaatgtttttcagcaaattcaatatcttttaatcttaattcttcactaataatttctaaatctctaacagggttaacatcaccttcaatatgaataatttctgcatcatcgaaacatctaacaacttgataaattgcatcaactgatctaatattagctaaaaattcattacctaaaccttcaccctttgatgcacctcttgtaagacctgcaatatcataaattgtaatataagctggaactctctttggtctaccatacatatccattaaagtatctaatcttggtgatggaacaataactcttgcttcttctggttcaattgttgcaaaagggtaattagctggattacctaatggacatctagtaattgcttggaaaaaagttgatttaccaacatttgcaagaccgacaataccagattttaaattattaccaggacgacctaaaaggattttcttttcttcaacttgtttctttggaggcatgttgtgtgtttgattagtttaaagtaagtacttaataaatccatccaagcagaaaaggaagtgtaatgccatgttgaaaaaatttgaaaaaaatgtcgacgaaattatagtagagtgagtgaaaaattaaattttgtttctcaatggggtaacttagccgagagtatgttatatttatttattggaatagcttattataattaaaagattagaaagattaaaaagattagaaaaataaacgtataaatgtataaatgtaatagaagtatagaagtataaaaaagttattcatattttgtattgtatgttttttgattgaacgaaattgaagtgtaaaataaaagtttttttgttttttattaagtttagtaaaaactaaactttttccataactggcataaattcttcttcaacttcaaaacctttatttgaagtaactgatgttaattcattagcaaattttggatcactaaataataaatcaaaatcttcaacttcttgccattcttcaaaaaatttacgttcaaaaattttcgtattctctggcatacctccaattggtgaaattaatgtacaaattaataaaactgatgaacttgctgcataacctgtaaaaaatgaaaaataataaacataagttgcaccaattggaacaacatgagttttagttgcaccaacgaaaccaacaatatttggtaaaatacctgaaatatatgcaacataagctctccaattaataccaagtgaataataatatggtgatttctttgatgcaatatataaattttgtaattcaatataacctttctttaaaatataataatcacaaaaaacgacacctgcaattgatgaaaggaaaactgaataagcacttaaataagttgtaaacattgaagatgatgacattaaattccaaggacaaattgcaaatccaattgctgcacaaataaatccacctcttctaatattaatatattttggtaataaagcagtcatatcagtaccagctgaaagtgaatttgctgaaatattagtacctaattgagcaattgcaaaacctaatgaaataaggaaaacaccaccacgatcacctcttgaaaatccatctaaaaatctatttaaaacatccagtggattccaataagtttcaccatacataacagttgaagcacttgaaactaagataccaataagacaagtaattgaaaaacaaattggtaatgaaataaattgtgataaaattgctgcacctggtttatttgcaaatcttgcaaaatctggagcattaacaattaaagttgcaaaattagcaagtgaattcataactgaattaacaaaagcccaaccaaattcagaaccatgaattgttgaaccttgatgaataactggtccaccaccatcagctttaactaaagtccaaatcaaaaatgcaatacctgcgattggacaaacaactgctttaacagtaaataaatgtctaacaatatgaggtggtaaataaatgaaaggtaattgacaaaaccaaaaaatgaaaaatgataataatttaaaagaagttgtattaccaccaattttatcaggtattctagttgttaaatctgtaccaaaaatagccattaacattaattcaacacaattaccaccaatagttgattgaacaccaaaccaaatacaagccataacaactctattaataacaggccaaagagaaccccaaataccaaatgatgatctacaagagacagggaatgaaatatgataagcattaccaactctagcagaagcagtaacaaaacaaccacaaaggaaataaccaatccaaacagttatccaagttacccaccaagataaaccagcttgaacaccagtagcagcaatttgccaagtattaacattaaaagaatcagcaatccaaaagaaaacataatgataccaatgccatttacgtcttacctcttcaacaggttttaaatcataattcattaaaaataactgttgtaatgaaaaaccttcagtaccatcaatttctaaccatttgaaaaattttagtaatggattatttgattttattttaccattattaaaatcattatcatttgaattaactgaaatttcagttgttgaaccaacttctggagttgcagatgaatcatctctaattttaaataaggttttaccatcctttgcagatgtttcaaaagaactcattattgctattttctggtagctgaagagaaatatgaaaaataattaagaaatgaaatgaagtgaaaagaaaagaaaataaaagaaaagaaattaaattaaatacactttaaaacagaaagaagggatagatgattagttaaatactaaaatacccaaatgtaaagcatcaaagacagggtgaaagattgccgtatatacataaaaaatatcaaacggtttgcgataagaaagagaaaaaagagaaaaaagagaaaaaagaaaaaaataccatgtcaaaattggaagatggtaaaaaaaaaattttcttttctttttaataataggataatttaatttaataataccacatctcttatcaaattattatctttatcttgatttctatcttgatttctatctttaccttggtattataccacattgtttatctattgtactattatctaaatatattctcttcttttttacggtatgtttaaccgcaattagtatatcaaattatcatgtaagccattgtaatattaaaatatcaccacaactcttatcaatgttatgatataatccctacttataatattatattctattcttagaggcatgtagtatataagcattttttccctcaatttacagttattattttaatttttatcatttactttatatggcgtgttttctttatcatatatacccccctctccccttgttaaagcggacacgaaatgaataaccaataatttggctgataatctagataatgttattattatgggtatatctcctaatacgtaacatgacataataaattaagcaataataatatcattattattattaggataagaatatattatgagaatataagtatacttattactatttgtttatcattgatttgatatataaactataagaacctaataagtagcctgaaagaagaatactaaaaagtaccttaacttagcctctcattcataatataatatgagaaaacgattgagtcatagttagaaaaaatttcttctttttcattggtgaggagatccacgcatgctgtattaaacttaagtttcgattattatgacacatttttcactttataggatcaacaatttcttttttagaatttatatagattaacttctttaaacaaataaataccactatagacaaaatgtcccgttcagactctgctgctccatctcaagatgaatacgatgatttacgtatcttagcaaatgaaccacttatctctcctgaattacttataaaggaaattcctgcaacaaaagattctcttaaaactgttataaaaggtcgtaaagatgcaactgcaattgttaaacaacaggatgatcgtttattagttagttgttggtccttgttctttacatagtaaagatttagctttagaatatgctaatttattaaaacctttagctgatgaattatcaaatgatttagtagttgttatgagagcttatttagaaaaaccaagaacaactgttggttggaaaggtttaattaatgatcctgatttaaatgattcttttaatattaataaaggtttacgtttagctagacaaatttttcgttgatttaactgatttaggtttaccaattggttctgaaatgttagatacaacttctcctcaatatttatctgattgtttatcatttggtgcaatcggtgctagaacaactgaatctcaattacatagagaattagcctctggtttatcattcccaattggttttaaaaatggtactgatggttcattaaatgttgcaattgatgcaattcaagctgctaataattctcatcattttatgggtgttactaaatctggtttagctgcaattattacaactaaaggtaatgattcttgtttcgtaattttacgtggtggtaaaaaaggtactaattatgatgaaaaatctgttcaagaagcaaaggctgctttacctgaaggtaaaacaattatgattgattgttctcatggtaattcaaataaagattataaaaatcaaccaaaagtttgtactgaagttgcaagacaagtttcaaatggtgaaaattcaattattggtgttatgattgaatcaaatattaatgaaggtaatcaaaaaattccaaaagatttaactcaacttaaacatggtgtctctgttactgatgcttgtgttaacattaaagatactgaaataatgcttagagaattagctgatgctgtaagagcaagaagagctcttaataaataattattgtaattattgtatattcaatattattcttgttacatttacatttttataatcctctcacataaagtctgaaattcatttatatattaaattcctccctatcgatatagtaatatgactaattaatttcctccttctctctaagtaaaaaattttttttcactcttacttcctaattaggtaatggtgataaatctaaattttcaaatttcatcggttccaccaaaattattatatgactctttctttgaatcataatctacttataatcaacgaagtcaaccatgcctgtagttcatgttattgatgttaagtcaggtaacttacagtcacttgccaatgcaattatttcactaggatttcgaagttaaatttattcactcatggttcagatccaattctagaaacttgtgaaagattaattttaccaggtgttggtaattttggtcattttgttaaagaagttacattcaagaaatttcgttgaacctttgaaaaaatttattcaatctggtcgtccaataatgggtatttgtgttggtttacaaacattatttgaatcaagtgaagaaagtgaaggtaccgttggtttatcaattatacctggtaaattatcaaaatttaatccatctaagaaaagtgttcctcaaataggcttggaattcagtcactctaacaaatggaaatgatgatgaactttatggaatttctccattttcctaaatattatttcgttcattcatatgctgcaatacgttcaaatgatgaaattaataaattaaaggaaaatggttggaatttagcattatgtacctatcttgatgaaacttttattgcagctgtttcaaaagataatattttagcaactcaatttcatcctgaaaaatcaggtaaagcaggtcttaaagttattaaatcatttttaaatgatattaaatcatcaccaattaataatgaattgaaattaaattctattaaaaataatattgaaaaaacagaaactggtttaactagaagaattgttgcttgtttagatgtaaggacaaatgattcaggtgatttagttgttacaaagggtgatcaatatgatgttagagaaaaggatgaggatggtaataataatgttagaaatttaggtaaacctgtagaaatggcagaaaaatattatttacaaggtgcagatgaagttacatttttaaatattacatcatttagaaattctccaattaaagatttaccaatgttagaagttttaagattaagtgcaaaaacttgttttgtaccattaactgttggtggtggtattagagatgtaactgatcctgatggaactaaacattcagcattagaagttgcttcaatgtattttaatgcaggtgctgataaagtttcaattggttcagatgcagttcgtgcagctgaagattattatttaaataataataaaggttcaggtaattcaccaattgaaactatttccaaaagttatggtgttcaagcagttgttatttcaattgatcctaaaagattttatgttgaagatccaaacaaatgtaaatttaaaacaattaaaacaaattttaaaggtccaaatggtgaagaatattgttattataaagtaacttctcaaggtggtagaatggttcatgaattaggtgcagttgaattagcaattgcttgtgaaaacttaggtgcaggtgaaattttacttaattgtattgataaagatggttcaaattcaggttttgattttgaattaattaatatggttaaatcaaatgtttcaattcctgttattgcatcatcaggtgcaggtaatcctcaacattttgttgatgttttccaaaatactaaaactgatgctgctttaggtgctggtatgttccatagaggtgaatataaagttagtgatgttaaagactttatgactaaaaatggtttattagttagagttgataatattgaattgtaagtaatattaaattataaattttataataataatacagtaaatagattttaaaaagtgttaatattttaaatgatcctatagcaattttgagttttataaattattgtcattttataccctttcatattattctataatttttaaaccatcttcgtcattctctgaaatcactgttttttactttttaggtggctcgtcatttttttcaatactttgtttttcttatttcttcaatattaactactttaacatcctttgaactatccaatataatgaataaagagttattatgcactactgtaactttaaacgacacttaatagggatttaaaccttatttataatagtatcttttaaaaaccacttcatacacgacatagaaaatgttgtgatatctccctcacacatagtaaaaatctatttctaaaaaattaattttaatacagtagaaattatacaagttttgatacaaattttaaatttaaatataagaattgattcaatgttcttcttcaaactcttcaataaagtctaatcttttctcaatcttttcttcatcttcaattttgatacctgcacttacactaaattgtccaccacaaccaattatctcaatatcatgttccttagttgcagtattatcaattctggtaggtttttcaacatcatcatctaaattacctaaaccaactgcataagtatctgcaaaaccccatgaataaacaaatccatctttggtaattgctaaagaatgatgagaaccacatgtaactgttttaattggaggtaatgtagtaattttagttggttttggtaaacaacgtacattaccattatcatcagtaatacaatcatcaattggcaatttatccttttcaataccaatttctttcatatcatatctaccaaaggtataaacttcaccatctgctgatacagctaatgaatgatgttcaccacctgtaatataaacaatatttttacctgttaattctttaatttcagttggttttgtaacaactgcaccatcatcaatattcatatcaataccacattgaccatattgattaagaccccatgataaaactttaccatcttttgtaattgcaaaactatggaattcacctgatccaataaatttaatatttttcaaactaaatgatcttggttctaatgatgacattaatgatctttctaaaattttacgtccaagttgatattgttgaccattaccccatgcataaacccatcctttagaatctaatgctaaaatatgatccttacctgcaacaattgatataatatcttctaaaacatcaattttaacaggagttctttgaatttttacagatttggaaaatcctagaataccttcattatttctaaatgtaccccatgcccaaacatgtccgttttctaataatacaacagataaattatcacttgcagctaatttaacaattttgacatcttttggtaatccttcaactttaccaggtgttgattcaaattcattcaaatcaccatcttcatcatcatcatcatctgcatccatatcttttaaacctttatcaccagtttgagtagtttccctacctaagacagcagaatcattagtaccccatgaccaaacattattatctttatctaatgctaaaacatgcataccaccaactgcaaaatcaacaattccaacatcttcctttcccaaaaatggatttaatcttggtcttttaacttccttagtcttagcatcaggtcctaaacctaattcacacattgaacctgaaccccaaacaaaaacatctaatggagttgtatttaattgaggcttttcattgattgatttataacgtgatgctctaattgattcaaagctatgatgttcacttggtttagatctcttggctggacctggtgtagtattaccttcagaaaccaagccatttgcttttctttttctaactaatttagccatttgtttgtctattcaatgtttacaatggttaaataaaatcagatcattcaaaagagtgaagattgaatcattaaatcagtaaaattatggaaccagaaaaaatgctgccttcctatttgggaaagagcatgaaaaaaaattttttcttttaagggaatttgaaatttttctttaacaagttcattagactggttataaagtgtatttgaaaatttagttttaggttaagagataactatggctaaagtatcagttaaggacgttaaaaataagaataagagcgttccattatatagagatattgctgcatctggtggaaaattaaaggctccatcatctaaatataaagctattgtctatgaaaagcaacaaaatgaaaataatgatgatgatggtgatgatggtaaagatgaatttgatttagatgcagttgcatctcgtcgtgttttacaacttgcacgtgaacaacaacaagaaattgaggaagaagaaaattttaatgaagttgcaactaaaccaagatttgaattaattcatgcagaatctgataatgaagacaatgatgaagaaatcgaggaagattatgaagaagaagttattgaagttgatgaatctgatttaaacccttctgaagttgctatgtttgaaatgttcttcaaagctaaacaaggtaataatgtaccatttgaaccaattaatctagctgataaagttatggaaaaaatggaagaagcaagaagaaatgcagagtttgaagatgaagaaggtgaagaggaagatgacgaagaagaaggaaaaccaggaaatggtgtttatttaccaccaagagtgattgaagcatatcaaaaagttggtgaatcattaagagcatggaagcatggtaaattacctaaactatttaaagttttaccaagtattaaaaattgggaagatttattatatgttacagcaccagaaatgtggacacctaatgcagtctatgaaggaacacgactatttatatctaatttaacagctgcaaaagcagaaaagtttgttagattagttttatatccaagatttcgtcaagatattgaaataaatgaagatcataaattaaattatcatctttatcaagccatcaaaaaatcattatataaacctgcagcatttttcaaaggatttttattcttattagttgaagatcaatgtacagttcatgaagcaatgattgcagcatcagttttgaagaaaacttctataccagtacaacatgcagcagttgcattatcatggttattagaacaagaattctcaccagctgcaactgtttttattagagttttaattgaaaaaaaatatgcattaccatatcaaacaattgatgatttagttttctattttatgaaatttagagttgtcacagataaaaaatttgaaattaataatgaagatgatggagatttcgatattgatattgatattacacaacagaggaaattacaacaagcacctccattacctttagtatggcataaagcatttttaggatttgctcaaagatataaaaatgatataactgatgatcaacgtgatttccttatggaagttgttagacaacgtggacatcgtgatattggacctgaaattagaagagaattattagcaggtaaggctaaggaacttccacaagctaaggccaataaagttgacgaagatgatattatgtcatacttctaatttaatataatataatacaaacattctataaagttttatctttttgtaattttaacgaataaagtggaataaattaatttattaccattattatcatttaattttaaatatctataaccatgattcaaatcatcaattttaccacaccagttggcaactgttatagttgaattactagctttaacaatattatttactttatcaataactgtactattttcctttaaacatttaacggtaattttaataaatgataaatcatgttcatttgtcttataattgagtctacatgcaacattccatcttggtgaaaatgcattaagtgggttttctgctaatcttgatttgaatttagcattccaattaggtgatgttgataaattatcagtatatttcattttaatactaccagttgaagtaactatagttttctcaatttcatcttcaatatcaacttcatcacatgtttcatcaacagtttcatgagttgtcttattactgaaatgtactatttctccattaactggtaaaacattaaaaatttcaatttcaacccatggagtatatgaatcattatttgatacatctttaggtttaggtaattgttgaccggatataatactaatgtcaaaatatttattaattgtatactctaatttatttaaattttcaatcttgatcaattctttactcaagctgctattttctgaaataaatagtgattcaggtttcaatctataaccattaaaattttgaaagaaagcttcatttaattgttgtccaatatcccaaatttgccaatttgtagctaccatttgacaacctaattgccaaaaagttattggattaaaattatcagatttatagtgcactacagatggataaattctcatcatacctctcttattatgttttatgatcgaatttttctttattttatcacgtagcagatttgataatgatctatcactgaatgagaaaacatgattgtaagttttagattcaggtaaggaaaagtttctaaattttataccagttaaatatggacaggaggcagataattcaggtataattaaataatttgaacttgaaacaaattttttttgttgttttaaatactgactattatcatcagactgcgttgagaatgaagaatgggatgtcgatgtttgttcaagtataattgtttcctttgactttttcactttcagtaaaattttgtgttttaattcattaggtgatggtaatgttgaaacatcattaattggagtcgttattagtttatcactgaaaattgatttcattatattcaaacatttttgttgattttctggtgaacatttaatttccaatgatataattaagggaaatggagttataataaaagcatatttatgaattatatcaataactaactcaaaatcaattgatgtagtaaatgtatgaccatgggttacaattggacctgattcactatcccatatatcaatttcaacacatctacaaccacgttgtaatgcattaatatacccttcaattgatgaattaccatgaaattgctttcctagtaaataagtattatgagatgaagatataaaataatcagtcaatggacgtgagtaataatcagatgattcacacaatgggatgtttaatgttggtggtgataaattactatgaaggaaattattcaaattattttgtgtcatataagagttatttgttgcaaatttattgaaaattgaaattggatcaattgaatcttcatgttgaacatttttcaaaaatgatgtaaattgttcaatattcatttgaccattaattatattatctaaatcaggtcgatttttcaattttaatacaaatttttgaaattgtgggaatgtcaaataacctgaattattgacatcacattcttcaaataaactatggagataagtattattgataaatatttgtaaatcattagtcaattgtaaaatatcattgaatgataaacgatctctattcttataaagagaatgattaagtaaagatttttcatttttcaataagttattaagtgtattgtaaactaaattaaaatttgactttgttatagttataatatgtaaaattttcaaatctgtatgtaatgaaggagattttgaaggttttgtataaattattgaaatccataaattttgatattgattagatatattaaattgttctctataatttttagcatcatcaccaatacgtatactttgaattctatcaattgaaagagaagaggaagtccatgataatgtattatttgaaattgtaaaccgtcgacgagtttgctttctacgagttattcttatcatatcaattcctggagatatgagtatctctggaatagttgagttaacatcactcttttccaccgaattatcattgatgttatcatcaattttcaagttatccatcatcactgaaaggaagaacgtgtcattaattaaaattaaaaattaatttcaataaaatttgagccatgttaatctaatgaaatttatctaacgtattaatatgcggctagtgtaggaatagttgttgtgttataagttatatatcgacgttatagatgttatgtatacggattataaatgattaattggattgtagacgaagtctctttggtgaccaatctgttaaggctttactacgtccataataatgtctttcataacctttcttttcattattatcatcgtaaaaatcaatttgagcagaatcataacctgtaaatgaaatttttggtaaaacagctaaatcatagacctgtacaggattagcaagcattgtaaatattttataagagaatttttgatctgcatcaacatttggaccaaatatttctctattaagttgaattgatgattggtcaagatttgaatttttcaatgatgtaaagaaaacaaattgatgtaatgtattcatatattcgaaagctgaatctgttaagattgatgagccagtaaattgtatacgtggagcacctgatgcatcaacatctgaaaattctttttcccaatctattgatttaattaaatcattttgtgaatatatgataaaagtaatacgtgcaataattctagctattaatggatgataagcctttgctctgaaaatacttggagtgaaagataatcttctagaatagtgatcagcccaatcaggagaattcagatcagcatctataccaagccaaactttagttggtaaagttgataatttataccaatgtttaattggtttaacatcagttgtatcgatatcagcatatacaccaccatgaaggaagacaagtaaaaattttaaaaattcatatttaagtctatcatgaggaagcattcttaaagcatcgacaacttcaggaacaagtggtctcattaaatcagctacaatatcttcagcatcctttaatgataaaagaatatgttcatgatcaggattagcagatgcccatctattaattaattctttacaagcatttgggaattcttcttccttagtatcatcaccattcttttgaaattgaatcaatatttgaagttttccaaagttgtaaaatattattttcaactggatcatttggattataagggaaatgatataacattctatcaagaattgaagtcatttgaaaagaatttcttgaaggtggagaagttaatactttaccattatgatcataaattgttaatggaatttcttgaattttattatcagttttagatgattgtctcaaagcagctgcagtatcgaaagcatgttgaatatcaggagagtgaacagatgggtgtaagatattaacagagatgatattcaagagagtgaacacgactatagtcgataccaatacataacgaagagtcattactgtcctgtaaccttattcaaaaagagatacaatcaataaagttattaatatactacacaaccatcataacataacataataaacagaactgaaaaaaattggaattttccactttgatcgcgtttctctttctctttctgtggatgattgctcagtcaatttgctgttgttattacatgagttgcttctttgttcttttgggattataccgacacagacaatggttgagataggtcccgtgcgtaggagaagatccattctatctggatgtgttgctatagccgttattgctactcttttctttataggatctcacgttttcactaaatcaaattttattgatatttctcaatttagtgctgttgatagtaataatatcaatgatgattcaaatgccgttgaagctgcaaagaaagctgatagtttaattcctcaaattaatcatatgcttaatgatcctgctcctcttcgtgatttatacctatctaataaacatcaaggttatgttaattatggttcaacaggtaatatgccagatgatggtataaattatttgaaaaattcaaataaagatgataataagaataataaaaataatgataatcataataagaatattaataatcaaaatgatgatagtaaagttgatagtgcagaatcagatgcaaatgatagatcaataccattatctgatgtttatatccctgatgaggaagctttctctaaaattaaaactgaagaatttattaaaggtgatataacattccaaaatttcttctctcatatacttaaattaatttctcataatcatttatcattcccacttaaacgtagaatgcaattagagaatggtaaaccagttattgataatgtcctattttatgaatatcctgaagatagattaagtgaacaagatttatatcaatttttcgatttcccacaaaattttattgatgatttaaaaattaaacatgaaaatgtcgttcgtggtatacctgatattgtacctcatttttataaaggtgatggttatgtcgttgttggtggtggtatatattcttggtatgctcttttaggtatagaaactttacgtaaagttggttcaactttaccagtcgaagttttcttacctgataaaaatgattatgaatatgaattttgtgataaaattttaccaaaattaaatgcaagatgtattgaaatgtcaactattttcaatgcagatagtttaaaaggttttgatgttcaaggttatcaatataaagcattcgccttattagcttcatcatttgaaaatgctttccttttagatagtgatagttatcctgttcaaaatcctgatgttttatttgaatctgaattatatgatgaatataaaatgattacttggcctgatttttggagaagaacaacttcaccaattttctatgaaattaggaaaactgaaattggtatggttccagttagacatttaaatgatttctttatctcacctgaatatttatcttataagcaaggtgatgatattacaactgatgtaacttatccatgatagagcaggtacaattccagattttacaactgaatcaggtgagatgttaattaataaaagattacattttaaaacacttattttagcactgtattataatcatgatggtccttatggttattatccacttttatcacaaggtggtgcaggtgaaggtgataaagaaacttttgttgcatctgctaattattatggatataaatattatcaagttactaaaaaacctgaaagattttatggttggtttaatgaagttcaaaattatgaacattcaacaattgttcaatataatccattaagtgattatgaattgttacaaaaaacaaaggaacaaatgagaaaagatattgaaactgaaaaggaaaattatgtttatgattataataaatatttctctcacgttttcacatctgcaacggttgatcctatgttttaccatgttcatgatccaaagatggatccatttaagatcatggataaaaaatggacagaaaatcttgagggtaaaaaaattcgtaatatgggtgaagatttcccaagagttaattttgatcttgaattatttgtttggggtacaattaatcattatatctgtgaactgagattagaattcaatgcatttgatggtaaaaactggggaatgttatgtaaagatttcatgccagaacaactgaaatacttacgtgaaagttcaaagaaaatttatgacgcgtacgatgcaaataacgttgttgaacaaattcaaggtggtcgtatctggaaataagtgtacacttcttcttcttcttcttggtatattatatattctatattctttatatctacataagtatatctttgtaatgaaaaaaaatatttatatttaaaagactatgcaaaagaattaaaggctaatttaaaaattcataaaggagaaactattataaaaggtagtgaaattgaatcacaatttaaaacctattcaaaattacaacgattgtttaagcatgttgataaaagagatgttaaagaatatgagaaacatatcgatagtttttataagaaaatagaggataagaggaaattagaggtgaaagatcatatagagaaagttatagtggaggaaaaaaaggttgatgaagttatactgagtagtgatcatcaagaggaagaaccaaaaaacgaagaaaaagaagaagaagaagaggaggaagaagaagtagacataacggaagttggaccgacaccacaattaaatggacgagtgctttctctatttgatattgttacatctcctgataaaactccaaagagacattttggtaattcttcacgtaaattgtcattcagtgaaagtgaagttaatgatagtaatgaagttaatgaagttaatgaaataactattctcaataaaattaatgaaactccaagatacttacgtactcaagcagatagattaagaggagtcggagttgtaatggataatcgaataattgatgaaaacatagttgattcaaaatttgaggaaccaagtcctatattgaaaaggcatggacgaagtatttttgatataagaaaggatttggttggattgaaaagaaatttgactgatttaatggaagaagcacaggaagaggaagaaatgaagataaagaatggagatgaagtgaagaagcaaggggaagtggaaggaagtgaagatgatgacggaggaatagaaaagaatgttggtgatgtaggagaagtatatgatccacatgctaaattacgtgctaagattaaaactaataaaagacaaacaagaagagctaaattgaaaactgataatatcaatgataatgatgaattggatagtatggacatccatgcattagcatttggtgatatcaaaagtactgaaaagaatgaaaatatgaaacgaataaatgatgatgatgatgacgatgaagaagaaggagattctgatgaatatgagagaagggatattgaagaattaaagattgaattgggtaatgcaacatctaagggtaaacatccactttcaaataattttgttagattaaagataaataaacgtggtaggtttaaacgtagacactaactttttataaagaaatattattatacaatacacattaattctaagcattaattaattctaacatacctattatacgttcagcatcttgagctttcttgatttcgatatcaatttttttctgtaaatttaaaattaattcaccaagtacaggttttcttgaaattaattcatcgtacatttcaaggatactaataatataatcatttataatactaacatttctaacatctttaattgatttaacacaccaagttaataaaggttctaatgaagtttcatcacgatttgataatgcattatgaattttacctttctttttcaattcttctaaacatgtaactgtaaattctttctctaatccatcctctaatgcactattaagtgcatcagaccaacgaaatgcatttaaatttttttcaaatggttgtaattttttatatttaaccttttcatcaataacataatgttcaccttcacctttaaaatcagaacctttagtatttctatcaaatgcatgagatttattactatttttcttactattggtattattaattgcatttatatcaattttatcatcatttaaagaatttttctttgttctaattgttaataaaccagaatttaaaccaacaactaaatgtttaaaatcaggagataccccacaacttaaaacacctgaaccaaatttccaaccgaatttaacatcccaattagttgtacttgtatcgaaaactttaacatgaccatcaattgaaccaactaatatacctctttcacctgcactacttaaacaagtaacagttttattaaaactatgtaaagatcttgacattttaccagcaattaaatcccattgtttaataacaccttcaccagcggatacaatactagttgaattaattgaaagtaaatcttcaacaggtgaagattgattaaatttaataattggatcattattaccaattctagtatcaaatatacgtataaaattatcataacaaccagttgcaattaaatttggagaattttcctaaaaatgtacctgatctaatataatcatcatgattattaaaggaaattattggtttttgagattgtgaaatatcataaattctagcaactctatcatccgaacaagttaataagttagtagttaatagttggatgaaatttagttatatgagttggatgagatgatggagtaattgtaactaataaagttcttggatgatgtgcatcgaaaatttgtacaagaccagaagcatcacctgcaactaataatttaccatcatgtctaaattcaccacaataaactgtatctttaaatctagtgaaattcttaacaactttcctcgtctttgaggaaaatacttgaactctagttgaagaagtaattgcaaaatcatgtggtgaatttggatcaaaatttatatgtgtaattgcattatgttccttaactagttgagaattggtgaaacctttccaaaaacgttgttcaggagatatctgtgcagtaactgttggtgtccttaccacctgtactctctctctattagcagacattgtatatgtggagtactttactatgtaatctttcttttataactgttaagtaaataaaattttttaaagatttacatagaggaagtgaaaaatttaaaaaaatattttttgctcggaaatttcgggggtttctgtggaaattcatgaaagtggcgatggtatgggaaaattccgagtatgtctgtctgtctgtctatgtgtgtacctgcttcttcttggagtggtaggcacaggacaatgatgttgagaataggtagacacaggagggcatttaatttgataaatgtattcaataatggatttaataatggacgttattattctttgagtaaggatgatattaagaatcaaccatctctgaaccatttccaaaaagagattgaacaagctgagccaaaggatgtcaaggatgtcaaggatgtcaaggatgttaacgaggttaatgaagttaaagacattaaagacattgcaaagccaccaaccttttttcaatcaccaacccctccaactcctttcaaaccagttaatacaactccaccaattgtgccaccagttttacctgtgaaacaatcaaaatttatgtatattttttatgcattagcatttttatcaactgcttatattggtgttgacatattgaatgctttaataccttcaaatactgattatataagtgaagaaactttagaattattaggtaaagcaattgaaaatgaatcaaaaaacgatattaataaatcaatcgaattttatctaaaagctttaaaacaattagatgatgaagaagttgagcatataactccatgttatacatcaatttgtattagaattgcacaattatttgaatatgagaaaaaattcgataaagctttaaatatctataaagaattaagtgaatgttatcttaatgcaattgttaatagagatgaattttcaacgttaaataaaaatgaagcattcgattttgcaattttaagaagtttaacaatttcaattaaatatgcaaatttattacctgaagaagatgtggaaattgcaaaggaaaatttattattcaatattgttgaagctcaaaaaagaattgttgaacattatccaccatttttatcaattttaaatgatattaataacagaaatattctatcattaattacatcagatatagaacaatcaattagtcatttatcgaatgaggaacaagagaaaattttaaaagaacaaactgaaaatccaattgttttacctttatatacaactgaacaaacacctgaaaataaattacttggattagatgttaaagcatggccagttttcactagagttttaataaatgcaaaggatatgtatgctaatttatgtattgaatcaaatgatttaagtaatgcaatttcaagtttaacaagtaattcagttataattcaaagatgttttgatcatccatcaagattaactttaacattaagtaaattaggtgttgttttacaaatgaattatgaaaatataagtaataatttcccaaagggtgaagatattgatatattattaaataatgaacatatgaaatctgatatttcatcaagtgaattaaagaaagttgtacttgcatcaacaacaactgaatcaaagagaattttccttaaagttttatcactatgtgatacaatgaaaaagcaagaacaagtaatgagaggtaataatcaattaggtaatttaggtgaatgggaagcaatgtttaaacctgcgttagataaatcagaaatggtttcaactgcttcattaggtatgattagttatcaagagggtaaattaaatgatgcattgaattattttaaaagggctaaaattttagcaaataaattaaaggataatgattatgttgatgatattaatgggtggattgaaataattcaaaattaatgtttatcataacacacaatgaaataaaaacttgtttataatgacgattaataatatactagtagtattatatataatataaagcaatagaaaagaaattgtagtaaatgaatacgaatatgaatataaatatgaaatatttaactaattccagttatcagttaaagcactatcctccggatcataactaaataattcagagaaatacagcaataaaactgcaaatatattaatccaattccaaaattgccatgtatgaattggcattattgatgatgatgaattattatttgtttcatttgagaataattcaacaaatttattatgtaaccaaagataaagatgagtttccttatcaatttcataattatactgaatcattaaatttgtataaactgcaattataatacatggtgaataaagataaattaatctacttgaaggagattgttgaggtttttcattaacattatttttattaattgatgataaaattggtataattttagttgctgcaaagaatactaaaattctaaatgccaattgagttaaaattgaaaatgttaaattattaatactaattttaaagaaatcccataatggatcaaatgaatttgggaaatgttcgaaaaggaaattaattaaatcttcacttatttgattaaatttattgaaaaataaaacaattttactattcttatttgaaattaatttatcaatccaactatcctttaaattttgaaaaaaataattaattttgtagtattctaaataatgacttaatttaataattattatattttcattattcaagtttagtccttttgcttgattatcaatttttttgaattcattgaaaacaaatttaaacagtgaacttatattatcatttgataattcaggaaacaattcataacaacatttgataatatatgcaaccattaatgaactttctaaagttgttgctctattaaaataaattgcataaaatgtaattaaaattgttaaagtgaaaaccgaacctaataatgaagcactaatcaaaccaacattttctaaatcaatcaacggtgatacataaattttaccaacaaaatagaaacttgttgacaaaatacatgaacttaaaataagatttaaaattgaccaagtatctgatttatttttaacaaaatattgaaataattgaccaattgcttgaattgatagcaatgaacagaaaccttccagtattgtaaataatggagttgaatttattaagaaaatcttccaaaattgtataatataagtccaccaaatatttttcaaaaatgaatcattaataacaattttttcatcaccattattgaaaactgttaaaaaaaatgataataaagttggtaataataaatgttgcaaataatataggaaacttgaaataaatctattgtattttaacattctaaaagttgctaatccgaaatataatattaaaattgttaatgaataacttaatccacaattcaatcctccaacttcaaaactaagtggaattgttaaaataatatatatcaaataaacagtggcaaacagcacacgcacacatcgtatgaaagtatcgtccgttgaatgtatctgatacgttctcttcatctttgtctatcagatatcagatatcagataagataagataagataaatcctataatataaatcaatatacttaataacagtcaccatttcctcatagaaaaaaattttttttttttcagtgttgtttcatgcatgttaaaaaatatttgctagtaaatacaggtgttttttagcttatttaatagacaaacacagggaagatgactcagaaaccagtaaagaggaagtttggaagagaggagaagagagtggttaccagaacttctagaagaagagatagatttgaagacaataatgaagaaatagatcaaagtgatgtaagtgaagatggcgatgaggaggaagaaggagatgaagatgaagaggaagttaaacgtacaattgcaattaagagaaataaaaaaggtgataataagatggcttattctgctttagttacattgttgaaatctgaacatgcattagatgaatttagggaagacgaagaggaagaagacttggaaaagaaacaagaaataaatgaatcagacaatgatgaggaggatgaagaggatgaagaggatgaagaaaatgaagatgaggaagatgaagaggaagaggaaaatgaacaatctgaagatgaattagaagaagatgaattactgaacaaatatgatgcattcaatcttcattttaacgatgaagaaaaaattgaaaaaattataaataaatttgattcattagcagcatcagagagaagacttaaacttgtcaacaaagaggaaattattgaaggagaagatgaagacgaagaagatgaagaaaagtttattaagtataaatatggatatccacaattagatattgattatagtgaaaaatcaggtaatgggattgaaagaaaattaaaatatcataatgttaagaagagagttcaagaaagattcacatcaattggagacattaagaaaattgatacttcattaattgaatcaatgttaacttatgaaagttttaatttccaatatagtaataatgaaagaattaagaaaaatatcaagattattatttattacatataatgaatcatttattgaaaactagagatacgattttaaacaataatgctaaaaaggcacttatatgagaaaaaattaaaggaaggtacagcaggtgatgaagatgaaccagaatttagagatcaagggtatactagaccaaaagttttaattttattaccaagtaaaaattttgcatataaagttgttaataagatgattaagaatttccaaatggaaaatgttgaaaataagaagaaatttaagacccaattttatgaagaatctaaaattaaagatcgtgtttataatatcaaaccaaaggattttgaagaatattttgatggtaatactgatgatatgtttgttttaggtgcaaaatatacacgtaaaacattaaaattatattcaccattagaacagagtgatattatatttgcatcaccaattggattattaagattatatgataaaatcaatagtaaagatgaagaaaatgattccaagaagaaagatagaagagataaagagaagaagaaggaacatgaattaaagaataatttcttaagttcaattgaaatttgtatcattgataaagctgaaggtattatgtttcaaaattgggataatataaatgaaattatgaagaaacatttaaatcaaataccgaaaaatttcatgaatattgatttttcaagaattagaatgtgggctattaatggacaaaatgaatatttaacacaaatcatgtgttttaataaatttaccacacctgaaatgatgagtattgttaaaagatcattaaatttaatcaatggatcaacatcatatttatcaattgataataaaagtgtaattgataaaagtaattataaattatttctaatgggggttattaataaatttgagagattaaagcaaatgtttttaagatttgatattgatatgaaaagttatgttcaagaacctgagaagagacttgaatttttcaagaattcaattttaccacaaattttaaataagacaagttataaatatggtacattaatttatataccaagttattttgattatttaagggttaagaattttttacaaaatgatacaagtgtttcatttgttgcaattgatgaatattcaagtaatagtaaaattactagaaatagagcattatttaagaatcgatcgaatttagcaccaattatgttatatactgagagattacatttttataaaaggttagatattaaaggtgtacgaaatgttatattttatcaattaccatcagatggagatttttatgaacaagttttaggatttattggtaatgaaaaattaagagttacaagagataaaatgaagattaaagttaagaatgatgatagtgatgaatgaagaagaagatgatgaagaggaagatgttgatttaaatttatgtatggttagaagtatttattctaaacttgatgccatgagatatgcaccaattgttggatctaataatgttggtgcattaacaggtgaaagtgaaataactgaattttcataatcataaggtaagtaatttaatatttatagatctgatatatagtatacaatttagaattagaattagaatttaaataatttatattcacttatctatccaataagttgctttgtagccataaatatacaacaaagagcaatatatggagacatacgttcaccaatacgagcacatttccagaaaagacctaaaagaccagttttatgtttgtctaaacctgaaggccatattgaatgaatatgagtacatgtacaaattagtaaaacaatcacctgtaaaagagaggtaaaattaaataatgcagactgttattattgttagtattatgatatatgagagtattctattgtattactatacataccattataggtggtcgttgtagaaagaagtgttagttggtagagaaaggtgtcaaagtattaaagaacgcgattttattgcaacatgaatattttgagattttaccaactgcatgactttattttattaataagagtaatggaaatatttgaatttgaggagggtgatagtggtatacccgatattgaaacagatgaagcaatttatgataaatatgtaccaacagatacggagacagttgaagcatatcttaaaagtttagatgaagaaattgataatgaaggtgaaccaaatttaaagaatggtcatataattacatgtgttaatgataatagtaaaattagctttttacgtagtattaatgggattttcataccaccagagaattttgcaagagtttgtaaaggtatttatagatcatcattcccacgtattgataatttcccatttttaaaaaatttacaattaaaatccattttatgtttaataccagaggaatatccaatagagaatgaaaaatttaataaattaaataatattaaagtttaccaaattggtttaagtggtaataaggaaccatttgttaaaattaaacctgaattaattacagatgcattaaaaatattattaaatcctgaaaatcaaccaattttaattcattgtaatagaggtaaacatagaactggatgtgttgttggatgtatacgtcgaatacaaaattggtcacaatcaatgatatttgatgaatataggagatatgcatatcctaaagagaggccacttgatcaacaatttattgaaatgtatgatataaatgatataaggaattatgcaattgaaaataatttaagttttaaatggtaggtaaagtccattttatataaacgtttttttaatttataaaatattaaaatatttacaaccataaagtccagcattagttaatgctaaacctgtcattgtctttgggaaaattttcagattccataatgaatttctaaaagttgaaagtacataaagtaaactccaaacagttataacagcagaaccattttttggatcattatcataacacataaaaccacctaaaccaataaatccactaaatactgcaacttgtaaatttgaaggataagcaggaaactaatctagcattttttttcaggaatgaactatttggagtatctactgatattggtatttttggagttcttaaaattggtgttaaaagaagtgaagaagagaataaccaagcaggtaaaggagatttcccccattgatttaaaattgaaatttcattaattgattgtgaatctgttggtggtataggttgttgtgacattgtatagtgaaagagaggaagtgtatgcagagaaagaaagaactatatgaagaaataaaatctcatgaaagatattataacataaactacacgtcccggaaataaaatttaaattttaatattttaatactaatatactaatatacacacacataaatataaatataataataattatactttataattaggatctttcacctcttaatcttcttgctaattgaatatctttcttttgaatagtaactctctttgcatgaattgcacataagttagtatcttcaaataatgaaactaaataagcttcaacagattcttgtaaagcaccaatagcggaagattgaaatcttaaatcagttttaaaatcttgagcaatttctctaactaatctttggaaaggtaattttctgattaataattcagtagatttttggaatcttctaatttctcttaaagcaacagtacctggcttatatctgtgaggtttcttaacaccaccagcagttggagctgattttcttgcagctttagaagctaattgttttcttggagctttaccaccagttgattttcttgcagtttgtttagttctagccattgttgtttggatgatagataaagagaaaaaatttaaactgattacatgcctacaaaataatgtagatcaatgtctctatttataaaaaagagcgaaattgtcttattcttatcaaattattttatttacacagtgtatatgtgtatatgtgtaaaattgataccagaccctcagtctcatatttactatctattataataactatcataccggtctgagatttattagattaatacgcgaaaatattataccgctcatactaaatatacactatacactatacactatacacggtattactattactattactattactattattactattgtaaaggagtgttatgtatggatatagtatgtctatactatattagaacattattgtataaatatcaccatatccccccaatttatatcttccatttcctctctcattatttctttcttcttttagtatcaaacaacaaatacaaattaattaataatgtctggtagaggaaaaggtggaaaaggtttaggtaaaggtggtgcaaagagacacagaaagattcttagagataatattcaaggtattacaaaacctgcaattagaagattagctagaagaggtggtgttaaaagaatttctgcacttatttatgaagaagttagagctgtccttaaaactttccttgaaaatgttattagagatgcagttacttatactgaacatgcaaagagaaaaactgttacttcattagatgtcgtttatgcattaaagagacaaggtagaactttatatggttttggtggttaaacttatttaactatttacttcttttttttatcttatttaagtctcagttattaggtattaattacctttataatgtgtatattagcaataaatttttattatatcgaaattatttttgtcttttatgattattatgcttaattatagtcatatgctcatataattatatgcttatatagtcatatagccatatagtcatacgcttatatagtcataacaatcaatccctcttatcaatttgcaatcaatacaattttttttttataaaatttctatttactaatttaaaaaaatactaaattaaaatttaagcacctaattcattagttaatctctttgaaactgcatcaataaattcaccagttgtaacatatgatgatctatcagtttcacctctagctaatgctaaatcttttgtcataataccatcaattttaacagtttcaattgttgccttttctaaaatttcagcaaatttaacaactttaggagtttcatctaattcacctctcttaattaaacctcttgaccatgcaaaaattgatgcaattgaatttgttgaagtttctttaccttgttgatgttgtctataatgtcttgtaactgtaccatgagcagcttctgcttcaaatgatttaccatcagctgaaactaaaactgatgtcattaaacctaatgaaccaaaaccttgtgcaacaatatctgattcaacatcaccatcataatttttcattgcaataatataaccacccttagatttaaccatttgagcaaccatatcatcaattaatctatgttcataccaaatatttaattcttcaaatttagttttataactttcattataaattctttcaaatgtatccttaaataaaccatcatattgttttaaaattgtattttttagttgacatatataatggtaattttcttgaaactgctaattcaaatgatgctttagcaaaaccaataattgattcttcagtattatacatacctaatgcacaacctttaccattaaaattataaacaggaacttcaattggttttgaaccatcctttggagtgaaaactaattttaattcaccaccacattcaggtgtaacaatattttgacatttatattgatcaccgaaagcatgtctaccaataacaattggtttttcccaatgttcaacaattcttggaatattttcaattataattggttctctgaaaactgtaccacctaaaatatttctaattgtaccatttggtgataaccacatttttttaagaccaaattcttcaactcttgcctcatcaggagtaattgttgcacatttaattgcaacaccatattttttagttgcttcagctgaatcaattgtaacttgatcattagtttcatctctatattcaatacctaaatcataatattttaaatcaatatctaaaaatggtaaaattaatttatctttaatcattttccaaataattctagtcatttcatcaccatccatttcgacaactggtgtcttaacattaattttttcaaatgccatttttgttaattgatttgtttactaaaagagagataagaaagaagaaaagaaagaaggaattctaaaataaagaatgaaaaatagataaaatcaataaagggatcattgaagaaaattggaaaatatggagaaccccccaagtttttataaaaaagatgaaaaatgggtaactaagattatatataatttcaatcaaatgattggattataggacagattccgttatcgggatttcaatagattaaaattaaattagctaataagcgctcttttctctaatgtttattatcatcggactataggggtccgatagtataattagtggtcacgtgttattgcgctaatatagtcacgtgacatttaaatttaacagacgcgactattacataaattaattttttgtaataatcagtagtataacagtagtataacaacaataataataaatactagcgtaaacttcgtaaaaaataattatcagttactcggatttaagattacccgattaatcttagatactgtatcactactaatcttttttccatttttcatttttcattttccattaattaggttttaggttttaggttttaagttttataaccatgaaataatgagctcacaattataattgataataatttacttgataataatatacttttattacgtagttttatgatgacaatttcaaataatcgtacaattcatttatcaaaatctactaataaatcttccgtttggaaattaaagttgatagtatagtatagaaaatttacataatttatatttataatacaattaggaattataaaaaaccggtaattaaacgtaattcacattcctaatacacactctctaaaagtacactctacatataacatttcttgctatttattaaattttttactctttgccctaccagttaaccttctccatcgaaattgacatccattagttgtcctacctgggaaataattggaaatttgaacccaattcatcttttcaatatcttttaatcttaataataatctatcttcttgtttactccatgattttgaacctcttttagtatcccaattaatttcatttaattgaacattggctgtattcttaaaattcatattcatatccatattctcattattgttattattattgatactattattattattattattattattattgatatcctttttaatcattggattaactaaatcaattacctcaattggtgctcccttatacactggtggataataagtattgttcttgttagtaccattactattattattattattattattattattattattattattattattattattattattattttgtacattattattcctattagttgtagtatagtattgtggtattggtggtaaatattcattatttattggtgggtaatatattatcggatatggctgaaccattgtaccattgctattattattaccattattatcattactattattagtttgtatttgtattactggcagcagtttgcatatgatggaatataagtattgtaggtgatggtataaattgaatattaggttgtggaggtggaggtaatggtaatgatgattgttgaagattttgttttgattgataatttattggtgatgaagaatttcgataattgtgttgttgttgctgttggtaattgtggtaatgatagtgatgatagtggtggtggtggtgggtaaatttggatgattgtattattggagaatttgatgctatgttatttaaatttaaattataattataactgatttggaactggttgataaatatcattttgtaatttaattgatggtaagggaattgaatgtgatattggaattgttaatggtacaagttgtaggatgcattgaatttgaataattattattaatatttggttgaattatattcatattaggattagtagtattagggatttaaattaggacttggtatcatatttatatgtggatttatattgggattcatataggggattcatatgggggttcatatttaaattcatagtcatattgttatcttgctgtgaatttgggtcttgtttcattgtaattttaatcagtaagataaatgtctataattaaatgacgtattatttagtttcttatatacgaaaataaaataattttaggataattttattaaattaatggtattagttatgtcaattgcttaattactaccttaaacgagatgtactgaataatttaaaaatataggataaaaagaaaaaaaacaagatgagtaaacaacagttaaggtaagtatttttataatataggataccatatacactactaacttaccacatctagtgaattcaggggaaatattgtaaaaagcagaaagaaagaaagattgaaagattgaaagattgaaagattgaaagattgaaagatagatagaagaaggttttccaagatggagtgttcaaacggcatcgactaatggagttaaagaaatttaaagattttaaaatatcaaacaatcactcgggtattaaattgtcacaaattcaactgaaacaattaataacagtgaatgatcttcaaaaaaaatgtaagaaactttaattaaccaaatttgaattcatccatttaatgcatcaactattcatctcttaattaaacaataggcaaaaataagttaaatttcactaaattgcaataaattgcattaaatttgccgattaggataaagtataaattaaataattaagatttaaccgatctcaaaccagcccactggtttaattgcattaaatttgttaattaattttaaggtacacttggaaaaattaacgaaaactctattattagcttttattataaattggtgagtagtaatgttaaatccattaattaatattaattattattaattatcactaattatattagcgtagtatagttactccaagtctaggtcatctctttataatagtattgatattattgttttatattaatatcctacatcaatatattctatcgtttaaaaatgaaaaagtaatgacataacacatcatatcagcagaatacagaaaaagaaattaacattctcgggaataactcatcgattttaactttgctattttaatatttgctgtattgctcttttgctcttttgctcttttgctcttttgctcttttgctcttttgctcttttgctcttttgctcttttcctgtattgctgtattgctgtattgctaaatttctttattgcttatattaatatatccctgtattgcttttatcaactcttgctctttcgataaggtatataaatgaatgctttccttatggcctttcccacattggtacagtatgtaatatgtaatttacaaatatctaacttacattgtttagtaataccacaagatataatacatgtgggtgtcaaaacataaatcgttatgacattatcttcaatatatggggtgtagctgttactagcatatcaatctcctaaacgtatatacattatattctctatttaattaatcttacgtaataccgtatcaaaacacagccaatcggttatatgaatgtgcatcagatgtttactatagtgacatcactgttagcagtgattgtttaattataaagaagaaataatttatctctacttacatggtcttttattcaaattgacttataaagaagatctaagtgacaaagttcataatcttaggaatctttgaattacactttgagtctaaccctaattaactttataggccgctcgtattaattggatattccagactttaaacttcttaaaattgcaaagagcaaatttctctttcaatatgtataggtagttctatagaacataattatcagtaaatacatatcataatttgtcaatacatactacctatctgtttctctaatgaacatagtctgtataacagcatggatatatggtttgcctatttccagaaaaaaactagtcatagcacctggctttcaatagttcaatattgagggttttcagggtctataatatgtatctcttattgatacttattaacgaacattaaatatactataatggagtattatattgaagtattagaaaacttctttgtcgttaattaaaaagaaagaccgttaaatatgttatgaaagcattcaatactagggtatatattaataagtacatgaagtgatataatagctatcaagattgactataaaggaaactggttaattaatggcattatacatagacttataaattgaataaatggtttgtataaatttgaaagttttgaagatatatttaaagtgctaaatactattcactgattacctacatcacaaatatgaaataaaagtagaatgataagagttagaaaagctgaaagatattgaggaaatcataaataaaaaaagaatattagaaacaaaaacaaagagaattgacaaattaaaggctgctgcaaaggctaaaaataaaagtattgaaaagttgaaaattgagattgaaaacattaattcacaaaatgcaaaatttagtgaagaaaagaaagccgtagaacctaagttggaaaacttggaaaagtttaataaagaattacttgaaaacatggcaaacaaagaatgtgaaataatgattgaaaataaaatgaaccaaaagaagacgaatgatttggaaatgagaatagaggagattggttgaagttaatagccaacatgagaagatagtctataaaattgaagatattgaaaagattattaaagatgtgttcattattttaaggaacttcattagtaaactgaatagtatgagtaaaatcttatatgaagatatagataacttttatttgatacttgaaatgatgggattattacttgtgcaaaatgaatctggtaataatgaaattcaaagagttaaaggtataggaggaagtaataggaagatagttggaggtgatgatgataatgataaagaaaacgtcatggatgattaaaaaattgtttatttaagttattgcaactgatatagttaataaatgtgatgttgaatggatttaaaaggaaatcaatgatgagaaatggcctattgacaagaggcctaatcctgaacagattactaaaaatataggtgatttaaaatatgttaaacttgatgatattgatgatagtatcgaaagtattgctttgtgttgataattgaaagtgttacagcaatttcaggtgttgatacaagagaatattttatgacccaggtttaattaatatggttgcaaaagttgaagcaaaagaaacattccaaattccacttaaaaatgcaaaacacaagccaaagtgtcaatgggtgctaagcttattatttagggtactttatccccacgttaagtcaataaatttagataatataatatagttaaatctagcactacattttcaagagataattacttgagagcatcgtatggccctattcgatctgcattcttttcaagcttcaaaagattacttcaacaaggttgaatcttagtgaaattatcatcaacaaaattgctacgcactccgtaaagtgtctataggttttaaaattcttctgtgaaaagcaatcaaaatgaaagcttatatattacataacttatttagtgtttatgaatgattatttaacataatttactattttaggttatcaagtcaaatcaaaccaattaatatttaattataggaatagtaaatatcaatctttaagatcataaatatatctataaacttatatttagctatgcactactactaattatagttaaacgatcaactgaaacaatttctttttaagaacctagtagaaagcttcagtctttctttttattaatatatatatatatattatgactaattaactaaggtaatagtggaaacaaaagtggaataagtgggaacgaagtggaataaccttcttcattgggcaagtgaagcggcctgaaaatatggggcattgtcccaaataggaaggtttagtgtcctttgacatgaaaattatttttattagcagatttttcaagggttctgtcttaatttaatttatagaaagtgaaaagtttttcacttgacattaaaggtaaacattggtcaggatattttattttggtacattaaccatctactgttctttctggttatgattcatattcttgttattactttcctttccattaaataagtaaaatattacaatggtttcaacaacttcaaatgttttagctacaattggtacaatttgttggtgtgttcaattaataccacaaattatttataattataaaagaaaaaatacctgaaggatttccagaactaatggcacttttatggtgtctttgtgcaccattctttgcgattttcgttgttattgaaaatgcatcaattccaattatgattcaaccacatttatttggatttttttgttggattttatatattcaaacaatgtattatccaccagttttaagatctaaaaaggaaattataataagagctggatcatttttaatttttgaaattatattagaagtttcatgtattataccattaaggaaactttatatcgataatggaattaaatttcctgcattaattttcggtataattgcatcaatttttttagcaattggattaattccaccatattttgaattatggaaaagaaatggtagagttgttggtattaattttttatttttattagttgatttttctggtgcaattttttcattagcttcattagctgttgataatgatgatttagatattatgggattagttttatatttaattgttgcaattttagagagtggtatttttatttcacaattcatttggttacttagatttagattgtttaaaagagaaaaggaaattgatgaagaaaaggacggagaggacaataaagaagattgaaaaatgttgaagaagatgttgatattagtgaaactgaattagaatcttcaaagagtgaaattcaacaagaaaattttaatcttactacagaaaaaggagtttacttttgatgattctcaccattaagtacaaattattgaacaataggtaatatagatcatcatttacatgtaaatactactacaatattgtgttaataaactaattttatagatttttattcattcttttgtgctttttttttctagtttataactcttatttaatctaatttaatctaattttaatctaattttatgttgtcatagttttttcttaaaaaaaataaataatatactatactatagaatatgaataaaatgataataactttaagtattaaattattgtttgtaatatttttagactatgaatttatataaatctaacatgcatcaggttgagctgcaatgaaatcaactgcttgtccaagagttttaattttatcagcttctgcatcaggtataagaattgaaaattcatattcaatttccataataacttcaacaacatcaaatgaatcataacctaaatcttttgaaaatgaagtatttgcattaagttcaacattttcaggagttttactataagattctaataattcaacaattctttcattaataagttcctttgttaattcaggagcatgactgtaaaatcttacttgtctattataagttattattttgtaaataaggatgtgaaagcaactggtgcctttaaagtagaagttcttgcagctgatgaagctctaatagcgagtcttgaactgttaacaatggatctaaacatgattaattgaacctgttaattgaaaagtaagtgtctatactgtaaagagtgaatttcccctcagtgaaggtcttctttgaagaaattcatgaaattttgaaaaagaagcgggtaattttaaatttggaatttttcatttccatttccattttcatgataatcttcttaagacactttatttcatttggaaactacaatgttacgtgctatgggtatagtaagagtgggtcatatggctctctcttccattagaagtataaataatcctattgttaacttcaaatctattcaaccaaattctatttcttcaatatcaccaatttcatcaattttccaattatcacaacaaagatttgcatcattaaatcaacaaaggaaaggtcgtggtttaataactaaaaaggaaagagcaactaaatctcctcatttacaaaattgtccaattaagaaaggtgtagttatgagagttatgattttaaagccaaaaaagccaaattctgctcaaagaaaagctgctagagttagattaacaaatggtgaaattgtttcagcttatatacctggtattggacataattgtcaagaacattctgttgtttatgttagaggtggtagatctcaagatttacctggtgttaaatatcatttagttagaggtgcaatggatttagcaggtgtagcaaatagagcaacttcaagatcaaaatatggtgcaaagaaacctcaagcaaaggaataaataagttcttcacttaactaaattcttgtaaatatataataatatcatctataaaaattattaattataaatcttttaaacatttttcataaatttctttatcagaatctgataaattgagttcaaatatatcactattatcattatcattatcattttccttaccttcattattaatatcattcttatccttaacaaatttaatatcagtaatttctttattgtttctattaatttgtttacctgaataaacaacttttttaaaccatttaaattctccctctccataacataatgtaattgcattacctgaattacctgctcttgcagttctaccaattctatgaacatattcctttgttgatgttggtaaatcataattaataacaaatttaatacttgttaaattaatacctctacttaataaatctgtacaaattaaaatacctccagtttcatcaaaatttttcaatattttattcctttcttgattattcatcattgaattaatacaatcaattttattatttaatccaaaggatttatttaattcatttaataatttatttaatcttatggttgattcattacttttagtgaaaattataccaaaattattatatttattatcaaatttatcaatccatttaaataaatttaataaaattaatggtttataatatgataatttttcagttatccttataactttttcattcaatgatttaggtaattgatataattcttgttgattatcactattaacaataactaatcttggtttaaataatcttaaatgtgttaatttctcactattggttgttaacgttgcacttaaaactaatttaatacatcttaatttgaaaagtttatcgatatcattattaaaagtatcgttattatcattattttcaattttattcattaataaatcacaccaatcttggaaattttgattcaataatctatctgcttcatcaactactaaaaatattaaattttgtaaattaattgaatttaaatttcaaatgttcaactaatctaccatggtgttgtaattaatatatcaattcaaattggatttaagtctcttattttcttcattaatacttaaatcaccaccacttttcaatgccattatattaatatctgtacctttcgttaattttaataaatcagaataaacttgttgaactaatggtttagttggtaatattatgattgcacttaaccctaaatctttaatcttattaccattagttaataattgttgaacaattggtattaaatatgataatgttttacctgaaccagttgctgcattaattaaataatcaccccttggtgttggatctaatttattacgttttaaatcttttaataattcttcaattaatgtaatttgaacagaaaatgcattttcaattttaaattcattttttaaatttttcaagtataatatcttcaatttttggtttgaattcaatgaaaggtttcgtagttgttgaatcataatatgcaggttttgttaaccaatcaagattttgatttttatgtatttgtgaatataattgtttatcacgtggtaattgtaattgtggtaatggtgcaacatctttaacttcaattggttcaatattttgttcttctatttcttcatcttgtccattaactagtggttgtttcttcataactttttgaaatcttgttagcactgatttatgtgcatttttaatatttatactatcatcttcctgtatttgttgggagttagattttgaatctgagtcggaatctaaatctgaatctgattctgaattactagagtcagaagaatcatcctctgagtctgatcctatttcttcacgttttcttttattattagtttcttccgctatttcattatcttcatttcccatttggatatcaccatcatgatctttttcaggtattatttcatcattttgttgaatattctttttatttttcaatttcttcaaaagtatttctttcttctcttgtgtggaagtattcttagatccggttggatcataacgtgctgcaaacattgcttgattctcagatagttgttactggtattacttagtgaaaaaaaaaatttttgaaattttgaaatttttcatgttgaagtgagaaagtatttaaaatagccgtttctttaatgttatataagttactacttctttctttctttcttttcacaagttatacattctgcattgagacagtcagtttgatgctctttcaccaagattaaagaaggattggtgtgagagatttgactggctgtttgaatcagagttgtgattgatacatacaaaaactaaatgtatcattttttttctttcatctcaagatgatggagaagataacttcatattttactaattcaaaagatcaagattttaaaagcattatgattttacatttacagatattatattagatctaatatattgcgaatcttcatgtttgatttaaatcaatttcttgatttgttttggtttaatccgttatattgaattaatttattgttttgatttagttcaatttaaaacatcgttcaagttgtaattgaatgatttcctgtatttggtcgtttaaaagttcgggtaatgcacgtttcttacttaaatgagttaagtaatcttcaattatttcacataattcatcatacctatcaaatttttgataaatatcttcattttgataatatcttcatttgataattaataaactgttcaactttttgattgttttcgtcaatataatttttaatatttaaattattttcgccaaagttttcaataaatttgagtaactgctcattaatttcatcttcaactaaattatgatatatttgagatgatcatttaagctcattataatgttagattttaaaatattatcatcagccttagaattttcagttagtacatcaatgataaattgcatatgattatgcatatcgtttcttaattccacgttatacttatccatttcatcattggcttcactgtatataagattttccttgtcctgagcaacataattttcaaagttgttcaaagatttggataaagattcagtttcatttttaattttctcctccaataattcaataatgttatcctttttggattcaataatttttgatacttccttcattatctattttcaattgattggtataatctgttaatttattatttaaccctcgattatattcattcaacttttgttctaaaggtgttgtttaatactttttgtgcatgtttttgatcattaatttgattcatcaaattatactgatctattttatttttattaagttggagatcaaaatcattgtatattttattctccaacttattcttttcagaaacaaatgcattcccaaattcgtttattgaatcacgaattttaccagcatccttctttatatcattcaccatattgtctctctgtttcattaatttttgaaataatttttcattatacttatcattactatcttggaattctttaaatttcttttgatgttgatcttgttatgaatatgattctttttttaatttatccataccttcattattacgaatattttcattttcatttaacttaattttattagcatctaattcgtttttcaatttttgtatagtttcttcgtgcaataattttgttatttttatcaccaccggaagaattaataatattgttatcattattgttaatattgtaattagtgttggtatcatttcccactgtattgttattaatattatcgccatctaaataatgtataaatcagataaattttgaatttaaagtacaatttaaaattttatttgactcggtggtatcaacctccttgttgctttaagtggagagcatcatggccagtttcacccctagtttatttacttatttataacatttatatcttctatacatagaacaaattttcattaacattattatttagcaaacaacctcaaagggtaaacccgaacatggtgctctcactcagagcaataaggaggttgggttcttatcaggtgaagcttcaaaaccaaggaatctttctcaattttgaaagcacctataaacctcaagacttcttagctgttatgagggaatctgtcaattcataacgttcctatctttagcaaagagatttttgataaattcagtaatatggtgtttcttagaactgaagcagacatttaaagggagattaaaactttcataaatagtacatacatcctttgtaacataaattccaccacattgtttgataaattcatgttttatgaatttcatgtaatttagttgaaatccaagtagtaaaaccaccaacaacagatctgctaatacttaaataggcagcagggtatacctgtattaccaagtattccctgtggtttcaaagatataccaggtgcagatggttcatcaaaagactgcaagcaaactgtttgaaaaaggtccttttattttaacaaacgataacttttactactgattacgtaatatcatctacttgattctttgactattgaaccttcacttttcttacattattatttattcaagttgctcataaaactactgtacattcatttaaattatttatttacttgaagtagatagataatcaagatacacccacattttgcaaaaaaaagtaaatctattaaccatttacacactgagtatcaaatagatccataattcatcgtaatatcttggtcctaaaaatgtgtagtagtattgatcatttcatcgcataacataaaggcattcttgttcactgtaatacttcaaaaacagttacaggagtttgttgtctactgttatcattattatccaatttctttaaattctcgatatttaaatcgtcatgtttgtcattttctttgttattattatcatcatcatcatcctcatcactattgtctttattatcatttttttctttatctttcaaatcattttcatcacgaactctttgtaattgttcaatttctctttgtaatttcaaaacttccttttcgaatttcttaccataataatccacataatatgcagcaccattataagttgcagataagaatattaaagacacaaaaattgaacaaaaatatttatatttatagagtaatggacataatgacattgtaactaattgatataaatattgtaataaagtaaatgcaacaactgggaaaggttcaggtaatgaattaacaaatttaccaattggtttatttgcaaatgattttcttaaatattcgaatgaagtcattttaccatttttaattttttcagctttcctaattgtaataaaataatgataacttaattgccaaataaaataaagtaatgaagtattaattataccataaaagatatcccattgttttaatttaactgaaccattaaatctaattaatttataatcataaggtaattgatgagttataacatacattataattgcaggtgtaacatgaataaaagttgaagtaattttttcaatactatgtaaaactaatttattcttccaagttacaacagcaaatgataatgatccccaagaaaatgaacaacatgaaatataaagcatttgactatcggggaagatccaaatataaatcatcaataagaaattaacgaaataacaaagatcaactaaaaaataaccatatccaattttataatacattaaatatctaattggcatcaataagatgaataagaatgaataaaatatatgaacatattgaggatgactgccaatcaatataccgaaaaggaagattgtataaacagttaatgaaaagaatattttttcagtttttgaatttttttgagtttcatcaattgctttataagttttatcaattcttatattgtaaaatttttttcaattttaataaatcatcatttgacatatttatatttaatttatttaaatttaatttatttttcttttcattataataattttgaacccatttataagtactatcacgtcttttctttaaattaatatttaaatttgaaggttcaagtaattctaataatgttataccatctaatgaaggagtacttaaaagtgtgaaagaattaggagttgttggtggaattgaattagagtctgatatattatcattatcattatcatatgatgatacattgtcatctataataacatcaattgaatccctacccaaagcagcagcagcagcagcagcactatcactcataatcaaagagcagacactgatataataaataaattgctatttacctctgtaatcaactcattgcttaataaaaggaaacgactttaaattaataaggataggaggaggctcactttaaaatattttaaaatgaccaattttcacatgctaaaatttatttacttggaaaaaatttttatggcacgttggggtttattataggactttctttaggggaagaacactgtgaagggtgatgaaaatggttgttacacgtagtaggaggacgcctgtgcgtgaggtcactaagaagaaagtaagtgggaagaatgatgatattgtggataagacagataaggtagataaagtcgataaaacggctaaaataggtaaggaagggggtagtaaggtagagaaaaatgaaaaagttgaaaaaatggaaaaagttatcaaaaagacagaacctaaacccaagggaaggaaaactagtaggagagtcccatcaagaaacaacagtgaagagacagatactaagaaatcatcagagatgaggcaaagggatgttaaagtatatactgagggtgaaatgaaaggtagaaagatgccagcatataaaattgaacaacttgaaaggctacagagattaattgatttatcatcagctgctaaacctagaggtccaattactcaaatagattatcaaaagaaagataataatagtaataataataatttaggtattaaacttttattatctaaagataataaggaaaaagtaagtaatataacacattttgatcctgaaaggaaaaactttttaaatggtacgattgaaaatggtaaattaaataaaattattaaaagatatgaaaaaatacgaaaatttaaaaatattaaagcaccaaatttaacaaatgataagttattgaagaaagtacttgatgaagtaactgccaaaaatgaaaatttaatgttttggaaaagttataatgatgaaatagagggtaaaaagttttggtaataataaatttctagtcaatgagaaaagacttgataaattagaaatttctgatactcaaagggaaaatttacttgaacaaagacttgaaaatattattaaaggtaataatgaaagtggcgaagaaaatggtgaggtaaatgatgatgataatgataatgataatgatgaaaatgttcaagaaatggtgaatgaacaacctattatagagggtaaaaaatatgaaaagataaatataagtcaggaatcatttattactaaaattgagaatatgattaatataattgataaatatgattcaaataatgataaaattattgatgaagaaacaattttagatggtctaaaatatgaggattatagtacagttagagattttaaaaataaaagagcatagatatgtgtatttataggatataatatatatatatatatatatatatataattggatagtaaattaacgttgatgtagggtatttgtatttgctaattgaaatccattgattgaattattatcatcttcaatgatttcaagttcattatcatttctaattaaattttcattatctcgttgttcattatgtgtatgattatctatttcaatattattagaagtgtcaatttcattatcattattaatttcattatcattatcattattgttattattattatcatctatattaacaatttcttcattaatttcattcctccattcccaataaggtctaaaaattgattttgatttaaataataatggtaattgatcattaataaaccaataaagatgaccaattaaaatacctgataaattaattaaccaaaatttataattattattacgtcttgataatgaaatatctaataataatgaaacccaaggtacccaaacacttttaataattaaaacaaataataaaacttcaacatttggatttctctttgtccaaatatataaaagagcagttttcaatgttggcccccacataaataaattaacaattgataaacaataaaaataaattaaagatattaaaattgttgtcatccaaatatatgaataagatgaattaaatgaagtttctaaccaatttgaatatcttgtaaaaaaatataatttagtgaaaaaatctaatgaaattgatccattataaagtaaatttaaaggtattttccaaattatattagtatttattaaagaatctgattcaattgtaatatctgatgacttaaataatccagtatattcagctattgataaagcagaagataataaaatataacttttcgttactggtggcattgtttgtagccattgtaatggtacagcttccattgttatatgcagttatgaataaatccttatgataaaatgatgatgtgttaataaaaagagatagagagaggtattaataaagtacttacttacgtaatgaaatattgaaatatttttttgaaattttcaacagggcgtcgtataaagtttgttaatggctcagcttgatctgatttatcttctttcaagagaggtatatagatatggatatggatatagatgatggggtgttattaccatatacatatttaaagaataatactagtggtaaaggatttagaaataaatttttagattattttaatttattttataaagttgatgataataaattagagataattaaagaatttattgatattttacatacatcaagtttgattattgatgatattgaagataatggagaatttagaaggggtaaattatgtgcacataaaatttatggaattggaagtactattaatgcaggtaatttaatgtattttaaagcatgggaattattaatgaagttagaaagtgataataataataataataataatggtaatgaattaaataaaatatttgttaatagtatgattaaattacatattggacaaggtaaagaaatttactggcgtaataataagatatgtcctagtgaggaagaatatctggaaatggttattggtaaaacaagtgaattatttaaattatgtgttttaattttatcatgtattagtgatgatgatacaagagataaagataagatagtatagatgaaaaattaataaaatttagtgaaaagcttggaattatatatcaaattaggaatgatataaaggatattagagatgattataagaatggtaattattcataccctataatatactgtataagagagaaatgtatgaaaatggagtcaaacgataaagagatagaggataaaataagagaattaggtggtatcagacacagtgaagagaaaataatgtcgttaatgcgggaagaaaagggaaagcgcgaatttgaaaatgatttgaaaatgattttcttcaggttgcttatgtaatgatcaggataatatactacagtacaccacattttattatgaagtatatcatattagccaataggagacgttgaaaaagggagcagaccactttccaaagtaaaatttctaatagggtgattacctaatccattatttgaagtatctggtattcttaaagcttttttttttcaatgtgggttataatatacagtactgttaattattattatacaccttattaccttaatacttgatatatttgctcatttttctattatattaaaattaaaatacccctatatttagacatctacaccccttctttcaattacaatgtttgcaaatactattagagctgttactagacaaaatttaagatgtgcaattcaacctattgcaagacaacaattaaaaattaataattcatcattatttaaaatttcttcaattagaaattattctgatcatcatgaagaaacttttgatgaattttcaactagatatgaaaaagaatttgaagaagcttatgatttatttgaagttcaaagagttttaaataattgtttctcatatgatttagttccttcaccttctgttattgaaaaagctttaagagcttgtagaagagttaatgattatgcaactgctgttagagttttcgaaggtttaaaatttaaagttgaaaataaggaacaatatcaagcttatttagatgaattaaaggatgttagagctgaattaggtattgatttaaaggaagaattatttactgaataaattagctaaagtatttaatattaatattaatacaataattaaaattcattcataatcattaaaataataataataataataataataaaaaattacttttatttcaattctataatattatataataataatatatttataaaactttcttctcttttcttattcaattcaatatcaaaataaaaattacaaatatttatttcaattaaataattaaaatcaatcgcaaacattcattatagtaattcattatagtaattcaattacaatatatcatggtatataatcaataaaataaaatacaggtaatgaaaataaaataatcgtcccatcgacctctttcttataaaatacgtgtctctctttaaatttcctcgtattctcaaagcggtaattagtaaacataaacatgtaaatacacttcaatttgttgtttatataggttttggaaaaaatatattacattgtaaacatcaagtctatcagcatcttctaatagtctatatatccatcgtaggtatcctattcactcgctattaccatatctaaactaacttactaacttactaactaatggataactaccaaggagatgtctgggttaccggattaaatttatccaatgatagaattttctataaaggtgaaataattaaaaaaattgattcaaatgaagacaataatgaacaaaatgatctttatcaaataaaattaactgataataatgatgaaaaattaataacttgctcaattaaaggatattcaaaaggcaaatccttcagcttttgatggttatgatgatatggcttcattaacttatcttaatgaaccatcagttttaaataatcttaaaattacgatattttgataataaaatttatacttattcaggtttattcttagttgccttaaatccttatcaaaatataaatatttataattcagattttattaaaatgtattcaacaaatcaacaacaatcacagaatgattcaaataattcaaataattcaacatcatcatcaaatattaaattaccacctcatattttcggtactgctcaaaaagcttttaataatttaattaatgaaaggaaagatcaaagtattttagttactggtgaatcaggtgctggtaaaactgaaaatactaaaaaagttatacaacatattttatcagtttcaacaaattcaaataataaagataatgcattaatcttagagaatcaaattttacaagcaaatccaattttagaaagttttggtaatgcaacaactgttagaaatttaaattcttcaagatttggtaaatttattaaaattcaaattaataattcaaataatgaattatctggtgctcatattgattggtatttattagaaaaatcaagagttatatcacaggataaaaatgaaagaaattatcatgttttctatcaattattgaaaggtgcttcaaatgaaatgcttgaaaaattattattaaatacaaattcttcattaaatgatttccaatatttgaaaaatggtttaacaaattcaattgaaacaattaatgatactcaagattttaacaatcttatgaatgcttttaacataatgaattttacagattttgatatacttaatattttacaaattttatcaattatattgcaattaggtaatattaaattctcaaattcaaataatgatacaaagcaagcagtaatttcagatgattcagatttaattaattgaaaatgtttcaaagttattaggtgtttcatcaactgattttagaaaatctttcttaaattcaaagataaaagttggtagagaaactgttagtcaacaaagaactgcaagtcaagctaaattctcaattgatgcattatctaaaactttatatgaaaaattatttgaatatttagttaataaaattaatgaaaattttaaaaatggaactgggaataataatgaaaatgaaaacaaagatacctcacaaaatgttttcttagattctccattcaataatgataattatattggtattttagatattgcaggttttgaaatttttgaaaaaaattcatttgaacagttatgtatcaattatacaaatgaaaaattacaacaattctttaatcatcatatgtttgtacttgaacaaagtgaatatatgaaagaaggtatttcttggcaatatattgattttggtaatgaattaaaaccaacaattgaacttattgaaggtaccaatattgataagaagaaaactaatattttctcaattcttgatgaagaatgtattgttccaaaaggttcagataaatcatttattgataaattattcaaagaattagaagttaaagattcaaagaaaatggatcaatcaaaattaatttttaaagcaaataaattaagagatggtttcgttattaaaacattatgcaggtagtgttgattattctgttgatggttggttaaataagaataaagatcctctaagttcaacaatgattgaagtactttcaaattcagataatttcttaataaatgaattctttcaatcaaatgattttaatttatcagattctccaattaaaggttctccaagaaagaaaactggtatgtttagaacggttacttatcgtcataaggaacaattgactcaattaatggataatttatctaaaacttatccacattttgttcgttgtattttaccaaattctgagaaaaaaccaaatgttttcaatgataaagttgtgttagaacaattaagatgtaatggtgttttggaaggtattagaattgcacgttctggttatccaaatagaatcgattttaaaacatttgcatcttattataatatcttatctgattcatttttcaatggttcttttcaaaaatttaataataataatgaatataaacaaacttgtgaacttattttaagtgggttggatttagatcctgaaatttataagattggtttaactaaattatttttcagaaatggtgttttagcttcattagagaagaaaagagaagagaagttaggtttgatttttactaaatttaatgcaatcgcaaggggtaaaataataagaaatgatttccaaataaaacttcaaagattaagagcttcaaaaattttgattagaaatttcaaattgtatgatgaaaatagttcagatccatggtttaaattaatcaaatcattaaagccaagattagatgattcaaatatagttgaaattcaatacacatcacaaattaaaaaactacaatcccaattaaaggaacttcaatcaaaagtggataatgatctaactgaacatactgcaactgctaataaaattgaatctttagaaattgaaattaatcaaaatagagaagttattaataataaagatgttgatttaggtgaatccagaaaaacaatcgttaaattagagaagcaattagctgaattaagtgaatcatcatctagattacaaaatgttataacggagaaagattctcagttggataaattatcaagtttaaatgttgatgaagtgaataatttaaagaaagaaaatgaggaattagttatctgctaaaaataaacttaataataaacttgaatctgaattaaaatcagttaaattgattaaagatgaattagcatcattgaaaagtgttattgatagtaaggaaatggaaatttcaagtcttaaacgtgaaaaaagagcaagggatactgaattatctgaaaatcttgatgaattaaagaataaagtatctaaattatctaaagaaaataatgaaattacaaaagagaataaacttaaaactgaatctttaaacaaagttgaagcggaattaaatgatttaagaagtaaatatagtactgtcaaggatgaattagctgaaaatttagtgatggttgaagattatgaatctaagaaattagcgtatgatcaatctgataaaatcaagaaaaagttcaaacaattaaaatatgaatttcaacaaactaaaaaacttttagatcaaaaaattaatgatgaaattgaattcaatgaaggtcgtcaacaatatatcaaagaacttgaagagactaaactcataatttctggtcttcaaaaggaactggaagttgaaaagaaagctacaattgatttagaattaaaacttgaacatgcaaaacatgaaactgaaagagcaatcaaggagaaaaaaatgttagaaattgataattctcaattgaaattaagattaagaactaataatcctgaacaagcatatatcaatcaatatgaaattaatgaaaagaagaagcaaatttcacctgaaactcataaattagctgaagaagttagattattgagaacaagattagcatctgaatcttatgaaaatagaaacttaaaggctatgattaaaaagaatggtaattatactgattatcttgataaattcaaaacctctagtacaagtagtaataactctcctactattgataattatagttttgatagtaatgaaaatgttaagattttcaatgatgttagtgaagctgatgaactaagagaaaaattagcaattgaaattgaatcaaataaaaggttacaagatcattatgttaaattacagaaagatgttatgtattacaaaggtaagaataagggtaatgataatggtgatttaaatccatttaatttattagatgctgattctttagaatacaagaataaattcttaatgtcagagattgaagttaatgatttgaaggaacaaattaaagatcttagaattaaatcaaaacaaaattcaaatattctctctgataataaaaatattattaattccaatgttaatgatgaaaatagtgttgatcaagctccaaatataaaattaaagcatgaaaatttaagattaatctctgcattaaatgaagttaaaactaaacttaaccgtttagaaaagggtaatagtggtagatttgaacaagaagaggaaattattcagttgaaaaataatttaaaaactgttcaagttaaaaatagtgcattaacttcaagtgtggaactctataaagatagatcagaagattattattctaaattgtcaaaggctgaagttgaattacaaagtttgagtagagaacgtactaagtttatggatgaaattaatcatttgaaggagaaggttaaaagatctcaatataagtatgaggagagtgatagtcaaatcaatagattgaatgaaactataagagatcttgagaagaatatttctgataaaaattttgaaattgcacaacttaaagaacaatataatagtttgaaagaaagatttgaaaatattgaagaactgagaaaaactgtcaaatctgttaactatgaacatcaagaatctgaaatcaaaaggctcaatgctgaattaatgaaaagtttaaataaggaaactgagttaggtaaaatgttaaaaaaccaaaatcttcaattggaaatatctagaaaagatattacatctgttaaattcaataattctgaactttccaaagagaaggctaaattaacaaaagctttgactgattgtattcaaaagaatgaaggattattaggtgaagttaaggaaaatgtttttaaagttcaaaatctatctcaacaagtaaatgttttgaaagttacaaataatgatttaattaaagaacgtgatgatttattcaattcaaaacgtatattagaaagtaaacttcatgatattacaattaaatttgatgaacatttggcaaaggttagaagtgatgctaataatgcagttcttgttgaacaattaactgaaaaattatcattatctgatgctaatcttgcaaatatgaatgagagaatgaccgaaatacaagataaatatgctaaactaaatgaagaattcaatgaaatcaattcaactcatttgaagacagttgaagaaaacaaagaattaacaaaactaaattttgaattacatgaaaaaataaaatctaataatgaaaaattcaaagctgaacttcaagcacaagatttacattggaataaacgtatgaatgaattggatgaaaaattatttacaagtagttcaattcaacgtaatgaaaattacaaaattgataatttaaccaggatgattaaagatttagaaattcgtaataaagatttagaaagatcaaagaaacattcagatgaagaaatcaaacatcttgatcaaacaattgaaaagattaattcgagctatgatagtttagctaaaagagaaatggaagctcaattaagatgtaagcaattaacaaaggaaattcaaaaatttagagaagaattaaccatctaataaaagatggtgagttttatgtattttatataacactaataaatgtttaaaattttataataattaaaaatattagaacaactcaatgggtgaaaaaaatgatttaatctaatatcacattacaatcaagtgtgaagataaaaatatcatgctcaagagaaacaattgaaaaaaaataagtagcaaatgcctgtcacccatgctgggagtcgaacccagaatcttttgattagaagtcaaacgcgttaaccattacgctacacgggcattgcttgtttaaaatatatgcaagaacattcttggtttgctattttatattacgtaagcaaaactagcgccttaaaatgaaagtatgataataatggaataggttttgtcttcttttctgttgatacacaaagccttaaaaagataaaaaaatttagaggccattgttatcagcaaaaattagtcctttagcaaccttttttatgaagttttctttaaactttatagattagaataacaaaaaaagattgtttattatacatcgtaaaaactatacattatacaactatttgttcaaaactgatctcaattcaatgaaacattttgacagctggtggtttgacatgaacaacaactgtgctagaataggtttcaacaacatcttgaacaaaatggttgattcaacattattaggcaagagattgagaattaaaaaggatcaggaagctattatcaaacttttattttctaaaacagtcataatgggtgaatttggtatgaacactaatcacacaaatccatgttgcatgaaatattaactgcttgtggtttagttttagatattcaagaatgcatgttaagaattagagattacagattcaacttatccaatgatagattccaaacactcaatcaatgggaagaattagcattaattatgaaattgtctaaatacgaaatgccaaataaacaaatttgcgctcacttagcagtcaattttgatttagattatcattgtaaggatattttagagatcatcgaagaatttatcaataaggaagacaatgatattcctttacttatcgatgcagtttaaaacaaactcaagtcattaactaacattagatcaaaggaaaatgttttggaagaactcattaataaaaacctcaatggtgtaacaactatactccaataaataaattaacaatgttgagaacaataataacggaaatcatagtggtagaaatgttagaagaagaagaaatcctaataattatgttatttgtggtgctaatcatgacacaagagaatgtgatagaagattcgataatggttgttggaaatgtggtaatttcacttcatgaacaaatgcccaatgatgattcaagatcaatgcaatttcaacgatgaagctagatcaattttagaaacagtgtaattctagatgactatatgaaaatgtataacaaaacccgaagataacaaccaataacaaagtgtgacctatacacactagttataaatggtaacttatacaagcagccagtaacctaatgctggatgtttgtacatgaaacccactgttgatatacttgtagaaagaaaacaacagcaaaaaagcaaaagagatattaggaagatgtttggtgggaaaaccagcgccttaaatagaaattttgaaacaaagacactcatgcaaccgtttagtcatgatcattttggcgttcttctacaatattctattacaatttcagtcggttgaacacagagaagggactgagttgtttctcggaaaataatgacatcccctgtgactaatataagtactgttccagacttaatatctacaggaattacattgtcggaaaggaatagttttggccgaaatagcattgctgagccagatcaagataatgacttgaatataaatagaaattataataaaaatgatagaagaaatataatgaatctaggtaatcagaaatccaacatcaataattccacttcaagtcagaataaaataccacaatttgaagctaaaactcaaaatattcatttattgcataaacttataaattcagttgaatcttttggtaattttggatcattagaaatttcatcggatggtatttgctttagtataagtgatggtaatattagtaaaattagattgaatttaaataaaaaagtttttgatgaattcacatttaatggtctttggagaaaggctgaatataccgattctgatttgtacgcagatgatacagatttatcgaataatgaagatgatgatgacgatgaagagggtaatggagataattatgttgtgaatggttttgataaagatgctgtgattataatacaaatcaatttaacttcattccttgaaactattaatattcatgttagggagaaaaaaaacatggatacagatgtaacttgtacattcagatatgaaagagatggtgatccatttttgataatttttgaagatgaatcaattgttgaaaaatgtgagttaaatacgtactatactgaagatcaagctaaaaaacaaaagggaaaacgaaagaagaaagcaaatcagaaacaaaataataatcatattaattctgaggtattcgatgaagaaaatgaattggctttaaaaatgatcgataatatgatggatgatagtatttttagactagattcaaccaagattttatttgatattattctcaaggcaaatatattacatgatacaattaaagatatgaatgacctaagtactgaaaaatttatcttatattgtaggaaaaccaaatcaaatgagtttttaaatggtattaacaatgaaagtacaaatattaaaaataacgaactgattttcatttcaaaatccaaatctgatactattgggttttcgaaattaattattcctcaaagaaaaactaatattccattatttaatctattcaaacctgttctaacaacatcaagtgagaatgaatatgaattcaatgattgtaacgatttatcattatcttcaacataccattttgaaaacttttctaagcttttaaaggcaataaaactttctaaaatgattaaaattcgaaaagatatgaatggaataacatcattacttctattattagggaaaactgaatataatcaacaacaagaattaaatggattatatggttcaagtattgaatttgttacactagagagtataccattcaatgaacttttcacaattaacaatgagaatgtaaatgtatctttattgggtaaattaggatatgaaaataagtttgttgaacagataatcaaggatgatagagatattcaaacaattagaattggtaatgatggtcaactgataacattagatgatttttttggaaatgttggagcagaatttgaacaaattgagaatcataatcatagtaacatcaacaatttcagcaatatacataatgatgtagaatatatacccattgagaaaattaacgagaagaaaaatatcagtaagaaggacagggaaagggagaaagaaagtgataaaaatattttaaaacttactgaacaattaactatgtcattattaggacatccaatacctgttggtggtgaatcagataatggagatattgaagttgagaaaactatgtttgaagatggagagagtgataatgaaaataacaatgtaagaagaaggaaaagagcatcaaatgatattaataaaagatctagaattccaaataaaaagactaagagtaaaaagaaagatgataaaagtggtaatgggaatgggattgaaactgttggtggcgcaattgaaattccattgtttatatagtatgtaagaatgtctaaataagtttgtatataatgaataatgaatgtggtagcttctttaagtttaattgcataatatctgtgtcattacactttttttatctaacatttaataaattgtttatgtaattattttaatttaaaaaaaatgaattgcaataatttgttaaaatttatataattttcaaaaatcacaaatcacgtgacctcaaaaacaggatggacatgaaaaaattcctactaaggaaaacaacaacaagatcccttggcccagttggttaaggcgtggtgctaataacgccaagatcagcagttcgatcctgctagggaatcagttatctttggggcgtgtggcgtagttggtagcgcgttcgccttgcaagcgaaaggtcatcggttcgactccggtctcgtccaatatattttttgccatattaaaattttttgtaatcttttaacataatagtaaaaataagcgggcctgaaccggtgaaaaggttgaaaagcgaagaaaattgatttcccactatcagtcactgaattttattttggttttggatgattcataatagtaatcgttaacatgattttcaatttttatttcattttcatttcatttcatcattttcaattatcttttctattttattttaagttatcttcccttcatcagttaagcaatgttattctctggatctctaaggttgactcaatgtactcgttatggtactttgaaccaactgagaaattattcttcttcaactgctgcaatggcttataaaaatttacatagaaataagaaaagacctcaattaccaacaattgaacaaccttcactctctgcagattctgctgttagttccattatttatgaaactcctttaccttctaaaactccaaaaactcaacatgttttaaattgtttagttcaaaatgaacctggtgttctttcattaatttctggtactcttgctgcaagaggttttaatattgattcattagttgtttgtaatactgaagttaaagatttatcaagaatgactattgttcttggtggtcaagatgcagttattgaacaagcaagaaaacaaattgaagatttagtacctgtttatgcagtcttagattatacacattctgaaattattaaaagagaattattattggcaagagtctctcttttaggtcctgaatatttccaagaattagttgctcatcataatgattcagattcaactgtttctgaaaaattaagagcttcaagttatcatccaaataatttacctccttctcaagctctgagacaaaaatatgaacatttagatgcaattactaaattaacttcttcatttggtggtaaagttgttgatgttagtgatagaaattgtattattgaattagctgctaaaccaaagagaatttcttcatttattgctcttattcaacctttcggtatcttagaattagcaagatctggtatgatggcattaccaagaaccccaattgatggtgttgacgatggaactgatccaactaaggatgctgctgatgtagttgatgtttctcaattacctccaggttagttgcatttatttaattttatacttatttcctataccattgaaatgatcaattaatcaaaaagattagaatgaattcatatacacacaaacacatatttatagtttatataaaaaactgaaaaattgaaatcagagatttgaaacaacaggagtattagtattgtagaggaaacaaatttaaagaatttataatataagaattaaaattctttgaattaatggataaagtgttttctatatttgtactaccatcaaataccttaatcattctattgtaaagatataatttaaaatttatactggttttgaatttatagttctctaaactattactataaagatcaaataaaagcataaaagtttcgatcaattttggtcttaactttaaagttaaaaacaatgacttatttaacccattactaatttctactgttaatggttcaatctccattaatccaatatcaaatgatttcatagatttactattttctaaataaatttccatgttgccaagatctatatctaaacttttcactaaacttgtcgttgatctaaccaataatccttcccaataattatctatttatcatataaaagatcatatgaaaataccaaatccatactgaatgtaccatcactatttaaatatattgaatcattttgatattgtatttcaatattatttgtaactatttcttggatcaatgaaaaagttttttgttgaataaaccatactaagtaactataacttacaatcgatattaacaataggaatacaaaattttcaagatcaatacgcaatattcgtttgatgaacattactattcactacaatctataatctatcttgaagacagggatgatttatttaacatgaataaaatattttaatatctgaaagaaaaactcatcgaatgaagctttaataagcgcagatctcagatatcagtccgaaacagaaggtccttttttgtgcgattgtgacatgtcacattttgaaatttacataatacttactatatatcataacatcgaaagcttccataaaactaagataaaactaattcaaataaaagaaaaaaactaaacatgaaaaagaaccagaaagaaacataaaaataaagaacccaaataaccttaaatgctcatatacaccaaacataaaacaaaatcattaatatcaccattagaactcaatatccaatggaacactgatactactaaccggtaaaaatccatttaaaacatagactttaacctttgcatcacctcttaatcttaactttgcatcagaatcaagtaaaatctttttcaacagaccacgaacacctttaccatttggccaaagagttacaaacaaatccatatcagtacttttaccatcaacaattttaacataaaatggatgaatcagcacatcacctaaatttaaatcttcctccttaataggatcatagacaatcaaatctaattcatcaatcttcaaattcaatcctctcataacaaatccccccttttggaaataatttttgatccaaaaatcatcaatgttagtataattattggtattagtaccagtaatttgtaaatcaataccaccattatctccaaatcctaacaatttaatattatctgtattgaaatatgtaccttcagcaattccatcaccaatatgaggttcaacatgaacaaagaaaattgttatcagtgtaaatataagtgtaactattgcaaatattggaacataaatgtgtaaattgtacttataggtttgatgtttcaaataattgtattgcttaatagctttatctttgaaagtatcattagagctacttcctaattgtaaagttccttcgtcgttaataataggcattgctattaacaaatttcgttgtacaataaaagaagatactatgggctatgtgcaataagcaaggcctgttatcagccatatatatatatattaatagagaagtgatgattcaatttttacgtaacatgataaatttttttttcagtgggtgaaatattttttgttcaccaatttgatgatatatagtaagagtattaatatttctttggaaacagcaacaataccccacacaagatgttatatatgattggtttaggtcttgctcacgaatcagatattactgttcgtgggttagcagcagttaagaaatgtaaaagagtttatcttgaagcgtatacttcaattttaatgtctgcagataaatcaaaacttgaagaattctatggtcgtgaagtcattcttgcagatcgtgaaatggttgaatccgagagtgataagattttagagaatgcagatgttgatgatgttgcatttttagttgttggtgatgttttcggtgcaactactcacactgatttagttattcgtgctagagatttaggtataccagtcgaaagtattcataatgcaagtgttatgaatgctgtcggtgcttgtggtttacaattatataattttggtcaagctgtttcaattgttttctttactgaagattggagaccagattcattttataataaagtcatggaaaatagaaaaattggtttacatacacttttattattagatatcaaggttaaggaaccaaatattaaagaaatgatgcgtggaaggatagtctacgaaccaccaagatatatgtctgttgcaacttgttgtcaacaattattagaaattgaagaaaagagaaaagaagaagcatatactccagaaactccatgtatttcagtttcaagattaggatctccaaatcaatcatttaaagctgcaactttgaaacaattagctgaatatgacgcaggtgaaccattacattccgttgttatgttaggtagacaagttcatgatcttgaattagattaccttttagcatttgctgatgataaagatgcttatagaaaagctgttatagcagatcaagaatatttcaaacctccacctccaccacctgctccacaagatattatttcttcagatgaagaatagattttactcgatattaattactaaaattaaaactattttttaaaacagtattatataaaacaaaactatactaatgtatttttatttaacaaggaagtggtttgttaaattaaactttaatatgaaatctattcgatttctaataaagtctttaatttcttgattaataaccagtcttctctcggcacggtacttctgaaagctggatcttttaatgtatcaatggattttctagtgattttagaatataaaccatccttttcatcaacatgtctaccccaagttggttgttgaccagatggtggatctaaacgcatagcaacaccggcatttgtatcaccttttctgacttgatttctagattcatgattaacttcaagagatgtaacagtacctaaaaccattgcagtctttttacctgtaaccggatctggtttaacagcacaaattggggtaccaattttaacacaaccttcattaacatcaacaccaataatcattggatttctcttgttaataatttgtaaagttttcagaacacatgggaaaattgcatcacctgcatttgcctttctcttttcttctaataatttttcttgatatgcagtaaattcatcaaataaatgataaataacatcagcactgaaaagtttaacaccttgttcattagcatattgttcagcttctttatcgactttaacatcaaaacataacataactgcaaattctttagctttatctaacatggcagttgctttcataacatctctcttataaactggacctaaaccaattgacatgacaggaatcttcatatccttcaagaaatctaataaagcttctaaagaacctaaagttgatgcttgaaccggtaacacccctaccagttggatcaacagaatccaataaaccagttaaatcatccataacatcatccatcatttcatcttcatcatcaccatccctaacaactaataatctagaacccgcaactgctttttctaaatcattagcagcaatcttaacacctaatgctgccttaacttccttatgatgaacatattcagatttaatacgtaattctcttgcaggtggtggggttaataaagctctaatatttgtagcaattggaccattcataccacataaaacaactctatcaccttcatgtaaaacaccattagataaaataacatcaatagtagtacctaaaccttcaataaccttaacttctaaaatagttgcttcaacatcagttaagtattttaattgtttactcattctcttttgagttaattctaataataaccataataaatcagggacaccttcaccggtaaatgcagaagttggaacaatagaaacatatttagacatgttggtattcttgtaatataattcactgtttaaaccttgttctgctaatgcaaccttaatttgagtgaatcttgtttcaaattcagatttaacagaagctttttggctttcaaaagattgacggaatgaattgtttggagttgcaacccaatcgtataatctatcgattttattcaatgcaacaacgaaaggtgcctttctatctcttaataatctaatagacttctaaagtttgttgttctaaaccatgcataatatcaataactaaaattgcaatgttacataatgaggaacctctagttcttaaattggtgaaagattcgtgacctggagtatcaatcattaataaacctggaacttcataagaaaccttttcatgagcttgcataaccttagttttttcttcaatagattcaattgggaagtaagtagcaccaatttgttgggtaataccaccagcttcaccaccttgaacattagtttgtctaatcttatctaataatttggtcttaccagtatcaacatgacctaaaatacaacaaattggagaacgtaattctttaccatctttagttatagtagtagtttgtggtaataaagattttgctggagctgaagtaaccggagctggtgcaggagttggagtaacaggtttcttgatttcttcaactttgttttcatcagagttatcccagtccttttgtgtgaattcttcttcctccttttcttccttttcttcttcatctaaaacatcagcagatgcttcttcatcgtcatcatctaatgccatattttcccaatcatcaattaaagcatcatcatcatcatcttcaccatcagcagatttcttgttagcatttgatgaggcattggagtcagcagaaccagaagcagaaccatttttatcaaatttcttacccttctttttatagttggaagctcttgccttttgtggtgcatcagatgataaacctgcaactttaatattaccagattgtaataaagcagctcttctcttttcttgaagtgccttttcttgcttttgtttcttggttaagaacttaccttctttctttaattgttcaaccctagccttctccttttctttctttaatctctttgcttcttctttctttgcttcttcttcttcctttaacttttcttcttcttcttctcttaatctttcttcttcttcaagacgttgtgcttcttcttcagcttgcttctttaattctaattgtctttttaaagctgcaatacctgctggaacttttttaccctttttagctggtgctgcctttggttcttcagttttagattcagtctttgaggtttcggaagttccatgttgaagtagattcaggttcaggagtattttcagtagatttggaagatgcaccctttctttcagcaagttgtttctttctttgcttttctctttccttcttttctctttctttttccttcttagttttaataacaggacccttttgttgttgttcagctaatttagccttttcttcttcagcttgtttagtcttcttatccttcttattctttgctcttttcaaatttgataagaaatcaccaccaaattcatcttctgcacttgcaacagttggaccagttgattcaacatcagcagaagcttcagcagcatctggatttacaccaaattcttctgcttgtggttgttcattctcaaattcttcatcccagtaatcctggttagcgttcttctttcccttctttgccattgtatttagctaaggtgcatatcctaatgaaaagaaacttaaaattgcaaatcaaataagttttacaaaccctccaaagggtgaaaagcgttaaatttcatgctgggaggaaatcgatgaattttttttttcactggaagaaatgaaaaaaatttgccattttttttgtctctgtgactttttttataaaaggaaccacttttttccgtattttgttatactaggatttagttaaaagtagctacttgattttctcttttaatcaaccactatataggaacatttacatgactaagtctgcttacatacagacctagtttaatgttcttggatgggagagaaatgctttttcttacactatccccagtttgagtcttatgcttgtattcacacctgcatcggatatatgagcgggatcacatttttagttgtatcatagtttattaattaattaattattgtaaatttgtaagtatagagtgtctataaaaaagatatataaataagttatctttatttaccaagtgaatagagaactaatttcttatagccatcaacagcttctagaagactatcagcagtaacatattcattatcaccatgagcaactaaaattgaacctggtccatataagtatcttttaaaacctttatgatctaattttggaatatcagttgcatatgaagcaatgtatttctcaaatccttcaacttgataatctaatgaagttggatcatcagtaactgaaacttcaaattttaatttcctttgcatatgattcatacttagagacaatttctgcaacaactggtacaatttcatcagaatcaacagctgttctcattaacacctgaacatttagcatatggtgaaacaacattaccagctgtaccaccattcattaaaccaatattaattgtagttttatttaataattcagatgatggccatggatagttttctaattcatgcattatttcaattaaaatcttatcagcatcaattccaacatctggataacccgaatgacttgcaagaccgaaaacttcaatatcagccatataaatacctttatgaccagctgctaatttattttcagttggttcaccgaaaataacggaatcccaagtaatattttccttattaaaataatcatttgattttctcatacctaaacctccaacttcttcaccaaatacaaataataaacttaattcatcaattgtaactaaaccttcttcaataagttccttagctgcaataacttgagctgcaactgaaccttttgcatcacatgaaccacgtccatgaattttaactgaaccatcatctgaatcttcttcaacataataattaacataaggaggaacagtatcaatatgagaagttaataaaactgatgaattttgtttatgttcacctccgaaagcataaatatttctattagtatcatcaatttcaaaatcataacctaatccaagattatttaaatatctttgtaaataacccgaaacaccatattcattaccactgattgattcaatattaattaagtcggcatgcaatttgaaaagttcaggattctttttaaaatgcatcagatatattagagtgtttacttactttttcaatatttaatgaaagttgttcaatggattcaatagcttcttcccaaatatttggaataattcctgcattaactgctaatgctaatgcaattatttgtaatgaattgagtaacataattttcttggtgaatgagaagagaagaaaagaagaaaagcttacaacaaacttccttcttaaagataagtttacaggatgcttccttgattaaatagaagtaagtttatcggtatcgtttcctaattaggaagttccgcaatttttcagtaactcatttgtttaactattatgcccggactacctttattattgtcatgtttatgaatattgagctctttgatacacttttagtaaactattttctataaagtaatagaaatatagcgtacagaaagtgtaaaacctagttaccaatataaaattaatattaaaattacaaaagctatgagcataaactagattacgttatttcttattattactatattattacatctctattctttaaccgttaatcatcatcaattatttcttcttctgtagtttcatcatcagtttcatcatcatccctattatgtataacattattattattattactactatttgatgacattgtgaatccccatacctaaacctaaagttgtttgatgatttggaaacttatatcggttttgaacattaccatcactactactactatgtcgacgagatgttgattcattatttaatatccctggagcagataatggcatatttaatgaattgggtaatggaggtaacattttatttgatactccatcaagtgaaggtaatcctccactaaaacttttagttggagatgcaaattgctttggcggtgaaggagagaaagaggaacctgattgatatttatttggtgatgaaagagaaatcaatgaaataattgcatcttgttctaaagcttgagaatctttcttcttttcatttgtatttattgataaattatttttttcctttggtttaattggtgatgctttgatatcccaaaagtgatgatttagagctactatttgattgcattgaagttgaaattgttaaaggaactgaaaattcagatgatttttgatcaactgatgatctaaatcctctttttgcaatttcatctaatttaacagatgcaacaaatgatgatcttcttggtgatttatgttgattattattattattattattgatattactttgattactattattttgataattattattaaattgaatatctgattcttgttttggacctggtaaattattagtttttaaattccaaaaatcttccaactctttttcttttgttgaaggaattggattacttatatttctacgaggacttgaagcaatttcttctagtgaatgttctaattcacctattgacttatttgaccaaccatgttgaaatttaacatgagcataatttaaacgagttcttaaattttcacttattttcctaatttctttataatctcttttaggtgatttgagtaaatgatcagaatcatattctttatgaatttgttcaggtgatttaacagatgtaacattaaacagttcaactgatcttcgttttagatttttatcatcaaatctaacttcaggtgattttaataatgaataaaaatcattaccattacgcctttgaggagtttgtagtaaattattatttgaagtttgaggtggtgataataatggagtatcatcaaaattttgtatatgacgtggaactctttcaggagtttctggtattatagatatttgagcaggtgaagcaaatgtagaagattttggtaatgaaggagttttaggacctttaatttctgagtcattatcattagtaatggtaatatgattattattattattattattattattattcatatttgaattatttgatgatgataatgatgatgctacttgggctaatgatggagtaggttgtagagttcgtacactattcattttaggggtaatatttcctgttgatgttctgttgttatatggatttaattgatcgagcccctgattttttagtttattattttcctgagttttattaagagacataagaatttacagggaaggaaatgcagtgggttttaatagttgaaatatatatcaagaagaacgaaagggattatatacgaaggtaataattaataaaagaataaaagagcaatacaataaataatatctttattgtctctaaataataatacatcaaaaatatcaaaaatataaatattgacgttacgttattaaaagatactctaaatttaacatattgtttgctttatttactttatttcttatttaagaagtgtaactgtaccatcactgtatgtatagtgtatgtactaagattataatagatgccatacactgtgatagtagatagtatagatagtataggtagtaaaagcagtaacggcaactcagtttaaaccaaattggtaatcttataaagattatacggggtttagtatattagaaagagagacagatagatacagatacaatccagagataaggagggtatgtataagtagattacaagagacttattatagagccattaatacagttatacagttaaagcagtattactacaatagagcgagggcaaatctaagtattattactgttgatgctcagcaattatattttggtgtcgaattttaagttgttttggtgtttgtttgattattgttcttttctttgggtctttcttctttctgattgaatgacaagataatataaaaggtaccatatacccttcacaggttattatttcatttcattttttttttacttctgtgcatgaataatgaatctgaataccccctttaaaaattataggaaaagaagttcttcgaaaaatatttcatctcctgaacctgtaattagtcccacaaattggtacaagtaatacaccatctaatttgtctaccaaaaataataatattgtaaaatatagtgttttgtatcgtaaattcacaaataagaagaataaaacttgggaaggtgatggtactttaatttggtatacaaataatgatattgctttaataaaaaatgaagatgatacaatgatttgtaaattaaaagatgcaaataaatcaattttaaaaggttcatttagtggttcaggttatgaatttgaattagatgaagaaattgttacatctaaaataccaaaactgactttatctagtactccaactcaaattattcataaacctatcattaaaccatttaaatcacctcttttaactattaattcaaataataataagaataatattataaaaaatatagatcaaaaagatcgaaaatggtcaaaatatcatacaaaaggataaaattgtcgaataataagaaagcttcaagatataattacgaaatccttcttcttccaagcagacaaaagaaacgaatagattaaaatcttcagatcccttatatgatatcaagaatgtccaaaatccattattcatgccagatttccccaaaagtattgatgatagtgaaattcatcgtaaagttgtcgttgatcccgtcttatctgtaaaattacgtgatcatcaaagatatggtgtagaattcttatattcttgtttaatgggtttaaaatcaagtgatattaatggagctattttagcagatgaaatgggatttaggtaaaactttacaaaccataactttaatttggactttactaagacaatctcatattgtgggaaaaaaacctataattgataaagttttaatttgttgtccagtatcattggtcagtaattggaaaaatgaattttctaagtggttaggaatgaatagagtaggtgtattggcaattaatggtaataaatttcaaaatgaagttagagatatacaattattccctaataataaagtttatcaagttatgattataggatatgaaaaaatgcagtcaatgtctgaattgttatctgaaataacatttgatttattaatttgtgatgaaggtcatagacttaaaagtagtgaaaataaagctatcaaaactcttaaaagttttaatattaaacgtacaattctattatcaggtactccaatacagaatgatcttaccgaattttatacaatggctgattttgttaatcctggaattttaggaagtttaaaacatttccagaaaaccttcgttaaaccaattttaagttcaagagatgcaaaatgtacgaataaagcattaataaagaaaggaaaagaaaaagtcaaaggaattagttgaattaactaataaatttattttaagaagattgaatgacgagttgacaaaatatttgccaaaacgttcagattatattttatttattgcaccaacatctttacagttacaattgtttaaaacaattattgaaaccaagagattccaaactttaattgatggggaaacggatgaaaatagtagtaccatcaaaaactcatcttcatcgtcatcgtctcttaatcttatcaattcatttagaaaaatatgtaactcaccttcattattgaaaacctgactcatttttcttagatatatctgagagaagttctaattctgctgaagatgtagagtttagaaatcaacttggtaaaaaggttaaaagtggtaaaatattagtattgatcaaattattaggattattatatgctaaaaatgatgaaaaagtagttattgtttcaaattttacagctactttagatattatcgaatcaatatttcaatcattaggattagcatttacaagacttgatggttcaaccccttctaatgaaagaggtaaaattgtcgacagtttcaataaatctagtacaactaaatcttttgccatgttattaagtgccaaagctggtggagttggattgaatttaataggtgcatcacgattaattttatttgataatgattggaacccagctgttgatttacaagcaattgcaagaattcatagagacggtcaaatgaaagatgttaaagtttatagatttttaacaaatggttgtatggatgaaaaaattttccaaaggcaattggttaaacaagatttaagtgatagatttgttgatcaaaagggtggtgaaaaagaaatttttgatagatctgacttaaaggatattttcacaattaattttgataaaatcaaaactaaccagtattgtaatactcatgaattaatgtgttgcgattgtaatggtaagggtgaaattgtacttgagaatgaatttggaagtgatttagaggatagtaatgaagaaagtgacgaggatgaggacgaggaaactaaagagaagaagaagtttatgtcagcattagattatacacaaaaatacccagataatgaaaatgaaaacaccaaagttgatgaaattaaaagaaaaaggttaagaagatgtttaaaaggttatagacacatccaaccagttcaatcatcaattgtatttaaaacagatgatgatatattagatacccttttgaatggtcaagatagggaaaaacctttgatttcttatgtctttggtaagtactagataatttagaatgttgtataatattgttaaatgtagaatataatttataaaattaataaataatcaaattccaccatcccatacttgaacaacattatcgtaaaaactacaacttacaatcgtattctctacccaatcaccaccatacgtaatactagaatgttctcccttaaaagtactaacaacttccacatcttgtgcgttctctgaattataacttacaattctaccaccatcatacatattacaagtcataactctacttatcatatctatgaggagaaggaataagtctccaaacaccaccattcaaattatgtttctcctttaccattggtggcattacctgggaataaactaccacttgatatattcaaacctgcacgtaaatctaaaacgcataattgatcatcataaccacctgtccaaatcatatagggatccgtaacattttcacaccaaccttttcttgatgtaagaatagaaacaatacctgcatcatgaattctattcgttgcaaatactgacattggttgccttatatcatgagctataagttgagcatcatcaccaccactgaaaactacaccatctaattctggagcatgtgcccaatcagcataccatgcctctaatgaatgttcagtagggaaaataggtcataccttccttcagctgatggtaattgttcatattcgtagtatcctaccatcccagttgttgtggtgaaagatatttgtgaatttctggggtgaaagttgattgaagttatcaatgtttcattagatgatgaggttggtttaggaaacaattgaacattatgtaattgatttatatttaacggatcagacttattgatattccagaatgttatattaccagttgaatgtgcagttgatattaaaaatgattcgttatttgaattaattgatttttcatcaattttgatatctaaaacagcaccatttgtttcaatagaatttatacacataccaatcaaaggcaatgagctaacattaatttctggattatcgttatcagggaaatcaccaggagtatgataattttgagaaagtttccatacttcaatagttcctttacgattatgtccttcaattaaagtgtaagtaccgaaatagacgaatagttggatctaatggattaatacgtaagcagcagggaggtgcatttgtcttgaacaatgcttttctatttaaaccagtcattgaagaaaggaagtaacgatgatggtgaaaagttggttgataaagttacaagaaacttttctttaaatccgggaaataattttgtcggcgtttattaaggtaaatttgatctgaaatcaaagatataggttttggactcattattggacattaagtcaattgggttggtaagttgaatttcagcaatccatgaaattagcagagaatacattttcataacccaagaacaataatgactcataataaagaagtgatattaaactgaagtttcctaaatgtcaagataataaagatttataaaataatgaaatttgcgagtgcatgaataataccttgagacttttcttttaataacttttcattttattgtaaatacttttttgtaagggacgataatgtcagaggagataccatatacaaagagatacgtttacaatttagatcctgcaatactggattcattaaaaacgttatattttgactcacaaacttttgaacaacgttcatatgaagacttcattaaacgtagaggtgatgaaatagttaaaagtatatcagatgaaaaattatcaacttcaccagttattgtacagcctaaaccacgtataaacagagatgaaataaatactgcattgtccaatttaaagatttctaaatctgaagaatatgaaaataaggatgaaagtggcaaagatgataaaggtattgattcagataatgaaagtgagtcagacagcgagtcagaaagcgaatcagagtcaaatgttgaagagaaaacattagagacaataagtgaagcgaccaatactaatatcagcaatgatgattatgaatcaactataagttttatgagtacaaaatcaccacttgttttatttgaatcaagaattttaaataatttaacaaaggggaaagttttcggtgtttataaaactacaataaatgcaaaagattcaccgaattatgatgctttaaagatgataagggaaatgtcacataatactgataatccaatgcctaaagatccaaagattgcaggtatgtcagcagttttcatgctctcatctggtcactttgcctggtgcaattatatcccacttaccacattcaactaagggtaataaaggtagcaatgaagaattacaattacaatcagttagattacttgcacataaaacatttcatagatatactacacgtagaaaacaaggtggttcacaaagtgcaatggatgattctaaaggtaaggcaaattctgcaggtagtacacttagaagatataatgaacaagcattaggtaaagatgttgaaggattgatggatgaatggaaaccattattagatcaatgtgaatcaatttttattagaggttcaggtaaaggtggtaaaaacgctagaggtattggattaataattagagatgcaaaagatcctaaagcaatcataaaacatggtgattcaagggttaagatgattccatttggaaccaaacgtccaactacgatggaaataaagagagcttggtgtgagttaatgtatttgaaaattgtagatatgcctgaagttgaaagagatttgattaataagagaatgaaaagagaatgagatgttgaataaatcaaaagaatctaaagataataaaaacggattggatgaagagaatataaaattaactaatgaaattatttcattattgaaaaagtcaaaggcacctggcttggttttattcttcaaaaaaaacaagagtaagttagatgttaattttagacttcaacccgttgagcaatacaaggcaactcccaccgctttacattatgcaagtaggaaaggtttgtcatacatggttcaaacattacttgttcaattacatgctgatgcaagtattttaaacaatcaagataaaactgcatatgaaatagcattagataaagataccaaatattctttcagattaagtaggagcttgataggtgaagataaagttgattgggagaagacacatattggagcaccaatgacaaaggaagaagttgaagaagttaaattacaacaacgtaacaaagaagaaaaggaaaaagctgctgaattgaaccaactgaaggaacaacacgagaacattgtcgatgaaatacgtaaagaagaagcacagaaaaacaaacgtgtaggtagctaattcaaagtttaatcaatggacctgggattaccaaggtcactgaagaacaaaaactttcaggattatcagatgctcaaagaatgaaagttttacgagaacagagattcagagcaattgaggctagattaaacaagggggtataattttttttatatgtagttacacacatctatatgatcaaaactatcttttagacaaaacggattcaacccattcacgtaatttctctttatctacatcattaatatctgtattactattttgaactttttcatcaacgtaaatatcagtaaggtaaagttttctttaatgcaacaactgatggaattttattaacaatataacgacgcattaattcatcatttctaccacctgtaagttcaatacaaacagtaccagtattttgagtttcaacattacgtataatttcccacatatttgttgccattgaattactcggagtttcacctaatcttacaaaagttgcaaataaagttccatgagaacttgcaggtgatgataataataaatcaaattcttccggtgtatgaattgtttggaaaactctaccgttccccttagctggtgtatctggcggataaataattggtaatgaatttttcaaaggtttatttcttgcatataaaaacaggccaattgtagcagcagcaaatataccaattcccaacagacgatttgtaaggtttattaacgggttcagacatgtagaattatatagttcaataatgattagtaaaacacagtggagttaataatctcttaataacgagaattagtcagcgaatggaaacatgatttttcagttatcaacacttttttgacagaaatggattaatggagtcaggtggatgttggaatattgtagactgtgacttttcttttgatcactgtatattattatcgtatatcatagataaaacaagacacaacatagcattaacaaatatgacagacgatattttcgagaatatgcctattatctcaccaacaggtgacgcatagagagggtgagaatgatgaagttgaaagtaaaggaaattctgttgttggatctgattcaatcgaaagattcaaacatttacacaatgagggagaaaatgcagaaggtagatgtatgtcaccatttcatacagttgataaagcggaagaaaagagaagattactgccaagtaaattaccaattgtacaatgtattgcaagagcacgtattccaacaacacagggacctgaaatatttcttcatttatatagtaatgattctgataataaagaacatctggcaattgtctttggtgaagatattagatcaagatcattatataaacaacgtaaaggtgatacacaatctgatcgtatgattagaggtgcatatgttggtaaattatatccaggacgtcgagatgcagattttgataaaagtacaggattaaaattagaatttgattcaaatggtgatatgattgttgataaaaatacaacatattgtgatacaacattagtacgtattcacagtgaatgttatacaggtgaaacagcatggagtgcaagatgtgattgtggtgaacaatttgatgaagctggtagattaatgggtataaatggtcatggatgtattgtttatttacgtcaagagggtagaggtattggattaggtgaaaaattaaaggcatataatttacaagatttaggagctgatacagttgaagcaaatttattattaagacatccagctgataaacgtagttttggtatggcaacagcaatattaattgatttaggattaattgaaattgatttattaactaataatcctgataaaattattgcagttgaaggacgtgatagacaagttcatgttcatcatcgtgtaccaatggttccattagcatggcaaggtgaggaaggtgttaaatctaaggaagttgaaggatatttaaggacaaaagttgaaaaaatgggacatttattatcaaaacctttgtaatttatataaatacagtattgtaaataatttttaaagagtaattttgaaaaccaagtattatacattattattattattattattataaattattattataaattattaaaattaaaaaagatggtagataaaattacaaaaggtgatgaatggagtaagaataataaatttacacaaaatatagttaaagaataaaattatttctttaataatttttcaatatcatcagaaattgaagctggattctttaaagaagaatatctttgataaactttaccttctttatcaacaaggaatttttcaaaattccatttaattgctttaaaacctaacataccagatttttcagatttaagccattcataaattggatcagctttatcaccattaacatcaattttttgcattaatgggaaagtaacaccgaaattaatttgacaaaattctgcaatttcttcagatgaaccaggttcttgacctgcaaattgattacatgggaaaccaataatttctaaaccttgatctttatattttttatataaagcttcaagttcagaatattgtttagtgaaaccacatttagaagctgtattaacaataagtacaactttacccttaagattttccattgggaatggttcaccattatttctagttgcagagaatgtatagaatttagacatttgtatagatgatttgattgatgagtgtattgatctcttgaacatataaaaataaaccgaattaactcaaaatcaaaataaactttgtgtcaagaatattataaaaacagaggggagtggcgagttttataccctctaaggtaagaaatttaaaaatattatgtaaaagggggctcagttagagtactacagaaaaagattccagattcacctggtgagattacaaattctttcttcttttaccacttttacctccgataacactccgagtgttcttattattgctattattattaatctttctcttcctggatgtgaccttcttcttcttactgctcttcttagccttcttcttgttgacatattccttaacaatagcttgtaacaaggtttgacaacgggccttgatctcaactgcatttcgacttaatatccaataatctccttccatgaataaatgttctccatattgaatctcattaaatatttgttctccaaaatattctccattttcacctccaagtcttaacatttgaacaattaaccatcgatcctcctcaatactccattccttctttgtagcagtatatggtaattgaatttccatatctcttaatggataatcatattcactaatcttaaatcttaatgcttccctttgaatatatgctctcctaattttttcttcacccgcttcaatttgtccaatatatctatcataattctcaatatctctaaaattttcccaaaattttaaactatattgacaaacttcttcatatgttttatccttaccaaattcttttgctatattaattaaatcatatctactaaatcttgcatttgcattgataaatgtgaaaaaatctcttctactccaattactaaatccttcctttaataaaattttcttctcttcctcctcttcttcagttaatggtctagcatgatcaataatcgcttgttcaatttctaaatcttcaatactcttattcttactacctttctcatttttagctttaatattccaaactcttttgtaatatgcccattccatttcataaattctatgtaatctctcattataaaattgatgatcatataatgctaaatgctttggttgctttaattcaaatgcatcctctccattatctccattaatattaccattattatgttgtgcattaaccatttgttgatgtgaactaatacctctattacctgtttgtaaaacttctctataatatccatcaactgaataattattctttctttctctcttacttaatgctaaccaattataaccttcagcaatactcttaatctctttcttttggaaatttttaccatcccattcataaactgattcatttgatgatgaaaaattttgtaaatcatcaagacctaattgtgaaaatttattttttaattctcctgttctctcttcactcttcattaaaattttatctaattcatcatcatctaattcaattttttcacctccattagaatctttaccatcttcattaccattattactactattaccatttctatcagttaaaacatcaactgcaccaaattgaatcatatttaataattcatccttattgttttgtgcattatttttcttttcattaataccatttctaccttgttgaataactaattgatctaatcttaatttttgtgatgctctctctaaaactttttcctcaattgcattctctgtaacaaatctgaaaactttaacttgtttcttttgtccaattctatgagctctatccattgcttgtaaatctgcttgtggattccaatcagaatcatataaaacaacaacatctgcacttgttaaattgatacctaaacccccagctcttgttgttaataaaaataaaaatttatcactaccttctttattatattcatcaattgcttcaattctatcagcatgttcagtttgtccatcaattctacaatacccccaatttctgaaaactgcataatcttctaaaatatctaacatacgactcatttgtgaaaaaattaaaactcttgaaccttgatttttcaattttttcaataatttatctaaaactaacatcttttgtgaattgaaaactaaatgttcatcagttgtatatggtggtccaggttctgcaccttcaaataaatatggatgattacaacattttcttaattgcattacaatatttaataatcttgatttagattctttcttaccatttgaaccattaactgcatcaatatctttctctaaaattgattgataccatcttttttgcattttagtcataccaacataaatatttaattcttgctttggtaataatgatttttcaacatcatttttaattcttcttaataaaaatggttttaataattgatgtaattgtccaacaacattatctctattttgactctcactatttccattttgctcatcattatcaatttcaccatcatttgagaaccatccatcaaaagttgttgaatctgcgaaaatatcaggtaataagaaatttaataatgcccataattcatgtaaattattttgtaatggagtaccagtaattaataatctatttttagaatgaaacatacgaatgatttgtgataaaagtgaatcttcattctttaatctatgagcttcatcaacaattatatattgccaattaattttctttaaaatagccttttctctaataacaatttcataagatgaaatcaaaacatcaaatttacaatttgtaatattttctttataattctatttctattttcttgatcacctgttaaaatacatgttttaacttctggtgtccatttagaaaattctctttgccaattttctaatgttgattttggtacaataacaatatgtggacctttaactttctttaaatatcttaaataaccaagaaatgaaattgtttgtaaagttttacctaaacccatttcatcagctaaaatacctgataaatcatttgtatttaatgaaactaaccaattaagaccttgaatttgataaggtcttaaagaaccattaatatatttaggagatttagtaaattcataacctgaatcagttatttctccttcatcatcatttaataattcttgtaattcattattttcactcttcattaattcattatcctcttctttctcagttttacgtctacgatgatctgatgaattatttgttgatttattatttgaattagttaaatcattaactttttctaaaacacgtttaaaattttcatccttttcagctttaacatcaagaaaatgtttaaataatggtgttaaagataataaatacttaaatctttcagctgttgcatcaacatcgaactttttcttttcatcagttacaaaatatcgtctcttcttttcatcaaatgattcctgatcattgacattttcaaatccagggtatttggaaataccttccatatacttacccaatgcatcatcatccacttgcattgtcatggctatatatcctataaaaatatcctataaagccctactaaaataaaataaaaggaaacactactgtccactaacaacaccaaaaagaagaagcacacacactagaaaaacaacaaaacaaaaaaattgatttcctttcgcgacttataatacttacttaagctttacttactctaaatgtcctacataattacgtactctgtagtccatatgcacaaaacatctgttaacatatggtaatgtctcaatggcatattgtagtgattcacctaaatcatgtgcatcccttaaattcatatctacattcttcaagacaatatcaacttcaacattgattaaatctccaatatgatacattctgaaattcttaattttagatatttcatcactgaatctcacaattaaatataatacttgttgatattcctccttggatgcatgtgatccacttaaatgattaatatgttcaaatgtaattgtaatccattgtaacattacatataaacataataatgatgcacctaatgcatcaatccaccatatttggaaaattaatccaataactgggaaaattaatgaaaatacattaaatacaatatctgtctttgcatcttcaactaatgcttgaattgatgaatttttaacatgtttacataaaaaatatgcaatgagttttgatgaaattgtaacaaccataataataattgaaatattagataatttagcaagttcatgatcattatcctttagaaaataattctttaacagattcaattaaaacttgtgaaaatgataatatcataataactgaaaaaatcataactccaattggttctaattgtttcctaccaactgggaatcttgatgattttttcattagcaaatttattagcaacaaaaataatcattgttgaaagaaaatctaatgatgaatcaactaatgatgcaataagtgataatgaattactaaaatagacaacaacaaatttacccaataaaaggataaaatttaatgcaaaattaaaataaattgcaaatataacaattttagatttaccatgatctcctgaacctaaaatttttgcaccttctaaatcaatgttacctggagctgcactaatattaatatgacgatgagttcctgaactacttgtatgtgtcattttaattgatttaggaacagttaatggagtttcatcattagcattagtatttgacggtattgctgatgttggaccaattatttcatcaataagatgagcgttctcttcttctgaattattctcagatgatgtgttatctgcataattttgaatcatttcaatttgaacaccagtatctaataataaatccatatcttgatatctattaatcatttcattttgttcttcatagaattctttaacttcaccatttttaattttatccagtttattttcatcaatatagtatttttgccaattaatcaatctactaattttaccaattaatctaaaaggtcttaatgcttgtaatgaatctatacgattatataattcaccaaaatcactatttgggaaaacacttaatcttctctcataattgagtggattattaacactaataggaacagttatatcacctgcagctttagcacaattagagaatgtctttgaacgatgaattaatggcattatctcttcctctgtcattttatgatttaaacgtcttggttctgtctcattgacttcagcagagtagagcggggttgctgcgttaatgggcgtttcctctgtcgacatacctgtatatttatataacaccaaagcaattaactgtacaaaccagataaaaagaacattgtcaccactttactttaatttactttactttaacaaagcagtacacttgatatattaattaaatattaattaatcgatattactcagccatcatcacatgacagatttccatgcaacatgaattttttgcgatatttccgggtttctcttctattaacttttattcattgattactaaacacttcttttcctttggccaaagtctatctattctaatgactactgtatccaaccgtcctcaactctccgcactaaacgctccagaaccagaacactgtcctggtccagaatcaaataacgcaggtaagggtgaagcttgtcaaacttgtgataacaaagatatttgtgaatcattgccgaaaggtccagatcctgatttaccattaatagctgaacgtttatcaggtattaaacataagttactggtgctttcaggtaaaggtggtgttggaaaatctacttttcacatctatgttatgttgggcatctttcagctgatgaagatttagaaattggtgcaatggatttagatatttgtggtccatctttacctaaaatgttaggtgctgctgaaaatgaaactattcatggttcaaatgctggttggtctcctatttatgttgctgataatcttggaatgatgtcaatacagtttatgttaccttcaaaagattctgcaattatttggagaggttctaaaaaatcaactcttataaaacaatttttaaaagatgttgattggggaaaacttgattatttagttattgatacacctccaggaactacagatgaacatttaagtgttaccacatacatgaaagaagtaggtattgatggtgctttagtcgttacaactccacaagaagttgcattattagacgttcgtaaagaaattgatttttgtaaaaaagcaggtattaaaatattaggattagtggaaaacatgtcagggtttgtttgtccaggttgtggtggtgaatccaaaatctttaaaccaactactggaggtggtgaaaaattagctcaagagttaaatttaaaatttttaggtagtgttcccttagatccaagaattggtaaatgttgtgatagtggaagatgtttctttgatgaatttcctgatagtccagcttcagaggcaattttaaatgttgtcgatgccctaagagatgaaattgaaggttcaaatcagggggaaccaatggaatactaaaatattaattcttttgtaaaattacatttaactatgagtatatacaatatacaagtcttttctaaataaataatctaataaatttaatacatcaaaacttttaattgcttatcattttgacatcatcagtttcaaattttgattctaaatagtttctttcactttctggtaactctatacagctcagttgtgctgatgtaaactgtaagttttctttaaacgtcacattaatcaatttcttcatcatcagtgtctttgctatcttaacctttgaattactatcttctaatactgatataccattcaaaacgccaccaattttagcctttaattcttcgcatttctctttataactgatatcatcaaaatctaactccttagctatctttgtaacggtgatataatccttataaacttctgcaccagttttgtactcgcttagtgattcaaattcagaaatcaaattatctaatttctcaagttttgtattattatttgaaatgacaatttcaggtgcaacatgttctaataatatcttatgaccagatttgaggttatttgctaatattaattcaagaacacttatgtaatactgtttaagattgttgaattcaaatgatcttgcttcatgtagtatattcataggtaagtgtaaacgatgatggagttcattcaatctttgattatcttctaggaatcctaacttctttacattattatataataaatcagtaatcaactcattgcttcttttttcattagtgtggtgttccaaaataaatatactttcttcaatcatatccttcttttctaatttcttggcaaatttttcaacaatttcatcaaaatatacttcattgaagtcaataacggtattgagatatttcataatcaaaaattgtaattcaatatcaaattgtggtaaaacagtactactggagtgaatcatcttaaataataaataataaatttgattattagtagtatcaactaatccattttgttcaaaatagtcaatgaattgttctataatttcatcaaccgatttggtagtatttccatatttaactaataaaaataatattattggccatgataagccgtctagatgatctatatattcctttccaagaatatctccactcaaaagcttgtaaattttcaaaacaccagatggaatgaatgcaattgtaccattactccactcttttaattgaccacgagctaattcatgtaccattgcatcatttgagtcaatcatagttaacaaaactgcaatatgattgtttttagtatttattgcatactgtatagcatctgaaattttatcagtacaaacgaaatggaatattctctctaatgaatcagttggagattcattgaaatcaagtgcagaactacccatggaattgattttttgtaaaaattgacataaaagttctcttctttttatttcagaaatatgtttgaatttgattgaattagtgtcattatcacatgctctgtatacttgctcactcataaatgattctaagaaatttgaatcatacaaaattgataatagttcccaaatattataatcctcacaactatcaaaacttaataatggaattctcaaagaaatagaggaatctactttaacttctggtagtccatttgttctgatttcaacttttctggttgaaacttcagatcttaaacatttaccatattcatttgaattattaaattgaagaggaggttcaataatagcttttaccagttttgatgtatctttattaccaaaaattaacttatcaacatttttaggatcaactttcatatcgtattttttatctaaatttttgttgaaaacagaaaagaatcccttagataaagctaattgctcatcccaattatcacttaccgatagttcagctctagatttcaaaaattgtaaattcatcacttccttaacttctggttcatatgctctaacttcaacaagatcctcaataccatcgtaatttctgttaatcagcgctaaagcttttgcatcaacattttcatcatcatccaatgatgagggcacagaagcatccacaagcacatcatcatcttcaccatcatcgtttttattggtgtccaatagtaattcattatttttaatctcactatcatttccttcttcatcttcctcttcatcatttaaaagaaattcaccaggatttactacacctaaatcagtcttttgcctcttccaattgtcaccaggttgaccataacctgcaattttttccaaggcattgatttgcaattcatttcttcttttttcattttgatattcattttcttgttgtttcttccatttggcaataagttcttcatcatgttcatcttcgtccactataccccaaattgaaaaatgtttaacttcaaaaacgtagttaccagttaatggatcaaaacttataaatttcataccgtgaacactcttaagtttttcaatatgtttttcaagaagttcgacatctggatttaatggatcatacttggatggaaatgttttttcaagtgtgataacagcaggaatgttaagtccattaccttgagatggtttctcatattcatcagaataaacttgtaacaatttattaccgataataatcgttttacctaataattgatcccatttaccttcaaaagctgataaatcaaccggatatttgtacattaaattaccatgaccttttctaccaacaatgaaattttcaacatgtgttaattctagtgaagtcttctttgaaagttcttcaatggatggaatacaccaataatcagcatcagtattttccgattcagtccattctgcagctttttttggtaattgctcagtaataggttttgaaaatgttagctcattattttcatcattaatatcatcacttttcttaactcttttagattttggttttaatgattcaataataaccggttcggatgtttttttatttgaattattcatatttctgaactgatttggatttttgattttagatagtaacactgcatctgcatcaatctcattatatttcttgaatgtatcattagggtttctgatgattaatcttctatattcacttttagaagctggaagttgaggtgaatctaaacctaacttacttgagtattctttaatttgttcattaatatcctttgccagtttttgtgttaacagtgttgtttttatgaatgttgtcatttgtaaataaaccacggaaattttcgattgaatatttacttggtgttttgaaagtttcgacaagctttgcctaccaatgatggttcatttttatgttcattaggtttagaaccagagttagttctttttctttttaactttaaattcatatcatcagatggtgcattggttagagattttggcatttccatatcattgagtttattaagatcattactgaaaagtgatgtcataccttgttgctgttgttgctgttgctgctgttgtgatggctgtaatgtattttgcgcaaaacctaaacctgaagatgcacctccaaatgttggattagttgaactatttccaaacaaggctggtttaggagtacctgtgttagaattggcgccaaaatttaaacctccactagtagttgaagttgcaggtttgttaaataatccaccgccaattccgcctttaaatgaatttccagttcctaaagccgattgtgaggtagtagagttattaccaaacgtgaatcctgatggctgggttgaagttgttgttgcaggtgttgtattggaattgttattcccaaatccaaaggtattagtttgattgttgtttattcccgttgcagttcccggtgttgcaccaaaggaaaatccacctggcttttggggtgctgatccaaacattgtcctaatgatgtatcaacgtttactacttaatgctactggtagtttataaattagaagaaaaaagtagaagaatgtcagtttccttaaaaattgcaatgaattttgtgttgtcaacaaaaaactgcgaaaaataaaaaaatttcaggttttcacccttttgaccaattttttttgtatggtttccatctacaatgttatgtatctaaaagtagttaaattttattttaaaatatgaaaaagtacaaaatatctattggaaaacaaaaataaatataaaaaacaggaaaagtatattaaataaatttttagaatgtattaaaatcaagcttctggcatttttgacataagatcaaaggcaccagtaccagcaagattgagtttacccataacaattcttgcagatggtgatttaagatcttctctatcagagtttaagacagccttagtcaaaaattgacatgtagtttcgtatgacatcttcataaatgatgaagtacatgaatcaataccttgtctattgaatgctaaataagtaccttctcttgtcatataatctgcaattaaatctaaatgtcttgaagaaacactaatagcataagtaccgaaaacacgattaatttcattaacaattgtatttcttgcagcttcaacaccgtaaactttcaaaacagcagcaacatcattggatctaatattattaacattaataaatgaatcatgttcccacatttcttggaaattaacaccttcagtaactaattgacgtacaccttgttcatcggatggatgtaaacaacgtccaatattttttacttcacgaacaacacatttcttacaaacatcttcaacaatattaaccataagtaatttttgagtttcagcagacaattcaagtttgaaatcacaccatgaaccattctcatcatcaaaatcatattcagtaacaaatgtatgtccaacaataacttcatgttgtcttgcttttgctaatttggataagtttctcttacctaaagattccttatccttcttattggtatcaatatccatttcatcatcattatcattttcactatcagaactttcatcatcagaactatcagaatcacttgaagatgcattaacaatatcatcatcacttctttcagcttctttcattgcttctaattcttcatcatcaggatcttcataagaaacagcttgcttggttcgactcttttcatcagaaccttcttcatttgaaattttacttgttgccttagttttagcaactgcaactccaatatctggcatatttgcatttgtttttaatttttgttttctcaattctttagcaataacagattctaattgataaataaattgtgatctaacagtattttctaattcttcctttgtaacatcatattcttcttgataatcagttgaatcaaagaatttaattttaatttgataagatctagttgcattaatacctgcattaacatcagcagttgtttcaataacagagacatcatcaataaattcagagaatttaattttagtaatagatttacagaatgcatcagcagattcatcatcaacatcatctaaaattggtaatgtcatttgaggagttttaatagatgcagaagcagtcataacaatttctcttaaacgtggaatacctaaagtaacattagcagcaccatgaccagcaaaatggaaagtatttaaagtcatttgagttgatggttcaccaacagattgtgatgcaataataccaacagcttcaccaggattaatcaatgatctcatatatttcaattgcattaaagctttaaatttctttgaagttaaaccaccattattctttgcttctttacttgaaacaaataatttttcattttgttcaataaatgaatctaatttttcttcaaatttatcagaaactgaacctaaatatcttgcaggattatataatgaaatagttggatcatatttattatcatcttcaaaatgtggaatatcaccttgttttttactatgttttttagcctttttattataatgaattgcagtttcagcatctaagttttcaacatttgagggactataacgttgtaataatgaattatagttatcaacaaaaaatttgaattcataaagatatgattcttttgtaacatcaattgaatcaccaccatacataaattggaatcattagtaccatcagaatttctaacagtagttatcgtaattaattgttgcaccttccaattgttttgtaagacaacgttgtaaataaccagaattagcagttttaacagcagtatcaattcaaaccttctctacctgccatacaatggaaataatattcttgtggtctaataccagaatagaaacgatttttaacataaccaccagctcttgcatcagtttcaaaaggtttgaaacatggtaaagttttacctgaaaccataacaggtactcttctaccttctaaagcttgttgacctaataaacacataatttgagaaacattaacattcgaacctttagcaccagataatgccatcgcttgcattgaattatatgggaatcttttcattgtaccatttggaacacaagttgaaacaactttacttgtaattgcattaactttagacattgtaacagcatctaaaattgccaatttattatcatctcttaaaatttcttctaatctcttttggaattctttatcattaacttcagtatttgaatctaaattagtaacttctgttgcagcaattctaccagtatcaattgattctttaatgatttcatttctccatttattaccttcatcagttaatcttaaatcatccataccacaagtaaaaccaatcatcataatataagttgtaaataatctacctaaaacagataatgctttacctgcaacttcaggaccataaacttcatgtaaagaatgaataataccatatttagatgaaccatattgagatttatcaagaataccacaaattaattcaccatctttgaaaataacatcattttcctttgaaccttcaccccaataatcatttttaattttattttttgaaatcaaattaatacctggagtatctaaaggtttaatattaagtaaaatagttgaaataacttgtttaccagtccataaaggaattggtttaaatatagttggaggtaaagtaacaattttagaacttgctgaatgaccttcctctggacgaatacatgaataaattaattcttgatatttttctcttgtaaagaaagaatctttattagttaaccaaacacctgcagaaatatgatcttgaattaaacctctaacaggggaaccagaagttggagttaaatattgagaatcagtattagctaaattaaaagcttcagctcttgcattttcattttgagggaaatgcatattcatttcatcaccatcaaaatctgcattataagcaccagtatttgcataatgtaatcttaaagttttttcacctggtaagactctaactttatgacccatcattgaagctttatgtaaagttggttgacgattcattaagacaacatcattatttttaatatgtctatgaacttttttattaacaacattaaaacctgtagttggagtcattaattgtgaagcaattgattttctttgttctaatgacataccaattaaagaaattaatgaaccatcttcattttgcacttgtgttgcaccaggccatttatctggaccattaataactgcttgtcttaattcagaaacattataatttgtaacaggttcaggataagttaatttaacagcgaaaactggagggacaccaatttcattagtttctaaatttggatcaggtgaaataactgatcttgcagcataattaactcttttacccatcatatgttttctaaataaaccttctttcttttctaatgcttgtttaataccaggagttggagttttagtattattattttgatttttagttgaatcaataaatccattaacatcattttgtaaagtaacaaaagcattcattaatctattaaaaataatttttttttcatccattgataaatctttagttaaatttgagaattgatcatttaaatctctaataagtaatgaagtatttaaaactttagttaataattcattttgagaattttcatgaatttcttcacctaattttgaaggtaatctaaatctagttgcaggaacgactaacgcattaataaagaacatatcagaagttaatttttgagaagataaaggttttgaatggaataaaacatcaataatcgaagattctgcattaaataaagcattcataatatttttaacttcagttgataaaacatattttgaaccagtttttggaggtaaatgaatgaaatcttttttatttttaattgaacctaatttaattctattattagttgattctttatcctttaaagcattttcgaaaattttagagaaaccatctttacggaaagttgaagagaataaaccacaattttcacatttctttttacctaaaacttttgaataaaaatcagtaattaattgttttctagtttcaccaacagttgcagtgaaaacaccagatttagttgttctaccatcttcaattgcattattaattgctttgaaaacaaataattctctcttttcccttaataatcttgatgaagagacagataatttagcatcaggagcagatgaatcaatatcattaaaattattattagtatctttatcatctaaagattcttcagattctaaaatttcatttgaatcaatttttatcatatctaattcagaagcttcaataattaaaccatattgtaacaattttaatttacattcaaatttatgaacatcatttgaatttaatttaaaatgattacaataaagacaagaagttcttaaaaaaatgtaaagttgattaaaaaataaaggattatagacaggaacaggtaattcaatatgaccttgatgaccaggacaataaatatcatttaaaccacaagttgaacaaatatttttcaagaaagcacctaaagctggatcatataaaccaccagatacaggatgacctaaattatcgaaaactgttggattagtaatttgctttgctgataattttctaatttcatcagcagagagaattccaaaatccacatgagtgatttcagaacctacaggtctagcaatatccatagtttgtgttgtgtagataggaaattagggttaaatttaaaaataacaaaatcaatgtaaaataaaattaaaaatcaatgaaaattatcacaatttgaaaaaaaaaaaataataaaaattttttttaattattaaataaatgaaaaaaagtatattacgtaatgtatgctgattatgtaatatgtaatataaatgtattacataagcaatatgaatagatggtgtactgattatatcacaaatgattaaactgtatagtagtagtatagaaggaggaacactgtgtagaagagagcttaatagaatatgataacattaaatagattataatagacagtataacgtcaatcagataagtaatagaagatatcctctgacatatatccgttatactatcttatcagtaaccaattgtagagactcttcactccgcggcagtgactcaacctcggtaagctttattgtattacgtattcaattagattaatactacgattaaatattaatatttaatctgaaattgttataaattgcagtggcaagtagttcttttcatttttctttctctttcttaatactttactttctttttcttcttcttctaaaaggtaaagataatagataatattattatacatcaattaacatattataatgacaaatacaactcccaactccaacaaagacaatttgtgttttctgtggttcatcatttggtaattcaccagaattttcaaaaggtgcagaacaattaggtaaattaatggctaaaaaaaattatggtttagtttatggtggtggtacaactggtttaatgggttcaattgcaaaatcaattgcaagtgaaaatatttatgttcatggtattataccaaatgctttagtttcaaaagaacgtaattctcaagttgaaattgatttaattaataatgaaattaaagaaaatgttgataatcataaaggtgaaaccccattagatgattcttatggtaaatcaactattgtatctgatatgcatacacgtaaaagaatgatgggtcaagaagctaatgcttttattgcattacctggtggtttcggtacattagaggaattatttgaaattacaacttggtctcaattaggtattcatgaaaaaccaattgttttattaaatttaaatggattttatgatgatttaattacttttattaataatgcaatttcaaatggtttcatatctgaaaataatggtaaaattttacaaattgcttcaacacctgaggaagctttagaaaaaattgaatcatatgtaacccctgttggtagatttaacttaaattggtcaaatcaataaattattaaattaaagtagtaatatatatataattaattaattaatagtttataaaattaataattattataaataaataaaaaattagaatagataaattactccactttaaatcttacttgcttttaatgggcattgacaattgataactaagataacaccgttaacattttatattaaattgccttatcttatctcagtgtaaaatttcgcagaaatttcatttttctttgacgagcccccctaatttttcatattttactctattaattctttcttcttataaatactatttagtatcataagttgtattgtattttgtctatagaattgaaactctgtcaaagaattaaatataatataaaataaattaatttttagaaaacttttacataatcaacaccatcaacacattgagcaacagtcatttgatcacctaccaattattttattaatttcaatacctaaatcagttgttgatttataaacatcatgttctaaaataatacctctaccttgatctttccatctattaatatcatttaaaatttgctttttagttctttgaggtggtgaacttctccatttgccaatcaaatgaatcatgatcccataaaactgcttgcataccaaacattcttgcaattgatctaactctatcatcaattccaccatatggtggtctataccattttggtaaatgattaccagttgcattcattgcccaaattgaccattcaaattgtgcaataatttcttcatttgttaaacttggtaaaaatttatgtgaccatgtatgtgaacctaataaatgaccccttgatttaatttcattataaatttcaggatatttaacaacatttaaacctaatgtgaaaaaagttgatttaccttttcaaattttttaataaattcaggtgtaaattttgatggtccatcatcaaatgtttgacttaattttggacatgtataaacatcatcatgactaacacatttaaaacaatcaaatgaacattgagttctaataactggacatgtacctgcagggtcttaatggaatattaggaattttattaaaatcaataaaatctaatggtatataaggtggatttaatgcctggccatttatttaatcctgtaaaacctttaagccattcaggaaatggttgtttagctgctgcattaattaaactatttgtatcattaattgaagaaattgatgtaattgatttatttgtaatttcaattttatcattaggactattattataatggtataaatatagcatttgtaaaagtaattaatgttattaaaagtgttattaaacaattcattattgctactttctttactattttattgcttttattattttattttattttattttatatttacaatagtaaggctgtttaatcaatctacaggtaagcaatgactgaactacaagattgtctacttgtttaattcaaccaaataagagaagagttattttacaaagagggagcagatacctgcatgttaaatacaacaaaaatttagttttcagcaaaataaggcaatattccaaaataaacagagacacggaagtgagttatttcttttaatgaagggtataattaatatttatttagtttattaaatagtttatacgtagttatttatatttgttagaagaaaagctttatgtaaatgaattgtaaatgtatagtatttattttctaatttttaattatcttcaaaccagttgaaggttgtgttttattgttattgttttcttgattttttggaacatcttcctcttctttagataatgaaagtttatttaaatcatctgatgtaaatgataccagattatcagaaactgatcttttatgagatttaatattataaaatgaagtcattatttaaatcaatatgtggctttttagacattgaaaaaatccctgtatcaaataaaacaggtcgattatcaatgtttttagatattatagaggagcaaggagttggagatcttgagattccatctgatcttggaattgaagttgaacgagaagatgatctagttgttgacattgaacctgatcttgatcttgatctactagatgatgataaattaaatgagttccctgatattgaattagaatgaggtttaagtataggtctagttgaagttgatgaacccgatgagcatgtcctctttttcgggctctgatgaggtattgttaaaagtgatgaattaacaatatttgaaatgggggtacgttttaaattagtcatagttgtaattgtagcacgtcttgaactttgtaaaggggttggatcagagattgacattgggaaccccattgagatattattattattattattattaaattctccttattacactatttgatgacgaggctgaggaaattgaagaagataaagaaggagatcttggatgataaaaataatttgattgaggaactgaactatctaaagtagatattgacagtgaatgaggagataacaggggagatgttgattcattatttaaagagttggaatttaataacaattgttttaaatgtttattctcatctcttaaataattgatttcatgcagaagttttagtacgataccttcttgttccttttcaataagatcaaaagcattatccgaatgggtaacagttgtagattgcattgttaataaatgaagtgaaagaaaaagaagaagaagaagaagaagaaaaggaagaagaagagataactaaactgactaatatcaagaagataaccactataatgcataaaaagataagatcatcactattataattttaaagttttgacacattaccctctccccttagtccctggcgcgataaggaatggcttccccagtggaagtactgggggatcacccaccatcactgcccatgaaatttgatggaaaatgggaaatttcattttctctcaatttctgtggctttctagaactcagggattttctgctggaatctgttaatcgactttgactctttgattctttgactctttgatttgattcatattttctataaataataatatagataatgtcaagtgataccccctgttactgataaaattgataaaaaatcaacattaaaggatgaaccaccaatgtggcttattggttataaccttttatcaggttgtctttggtcatttgttttattaaatgttattgcaactcatatttcatttggttttgatttttatcgtacattccaattaactcattggtggacaacaattattcaatgttttgccgttgtggaaatttataattcagctatgggtattgttcgtagtccaattctaacaacaacaatgcaagttttatcaagacttttagttgttattggagtttggacaattgtaccttatgcaccaaataattatagttatgcatatttaacagttcatattgcttggtcattatctgaagttattcgttattattattatgctcaacatttaatttcacaacaaactcaaattaaaggtcaaactccaaataaagtttcaccattacttttatggttacgttataatgcatttattattttatatccattaggtattacatctgaattaattatgatttggtcagctgcattccattcaaaatcttcaatctatggtttattcttacttatatcaatggctgacatacatacctggtgctccagtgttattctctcatatgcttgttcaacgtaagaaattcctcggaaataaaattcactaagaaaacagagtagtcgcgtctgcgtctctatataaattttttatttatttactagtagaaattcataatttttttgtgtaatgaacgcttgagctttattaatagggaacttttcactctgctggaaggtctaactaaaagaaggaaaagaagtatactttcattttaagcaacatactcacatcttaatacaatgttcagaagactatataccactgctgttaaagattacaaaatttttacaacctttaaaatttgaagatagtctatatgcaactttaaaaattcataatcgttcatatcttgtaacaaagggtgatatcgttaatttaccattttgtttacatactgcaaatgttggtgatagtttaaaatttacaaaaattgatactattggttctcgtaattatacttataatattaatgatggtattgataatgatttagtaagtgtatctgcaactgttattgaaaaaactaaaataccaatgactataaaggaagttacaaagagaagaaatagacatacaaaacatattcattcaaaacatgatattacagttcttagagttgatgacgttaaaatactttaaatctatatatggatttaaaataaataagtttatcatactatatcatactataaataaccatttcatttgtctctccaccccattatccattatgcttgtataaagttgtaaatatatatcaatattgaaaaacataatcttttataaagttaatctaatatgtgctttaaagcatattatggctattgtaatgcacaattaatgatttagtatcatgaatcccgcaatttttcatgattttcattattttcctacaatatctatttttaaaacattaataaattctatttttataatcttatataccgataagccatctatatacaaacaactaatcattacgtgggtattgataacaatataagaaattttgaatttcaattattcccaaatataaacaatgtcagaggatattaaaaatcaatcattaagagttgacacatcattgttgaatactcaacaaataccaaaattaataacaccgaaattctccatcatctcctcaaaaatcttttaaatcatctaaatcttcaaattcaatatcttcttcatcatcttcttcaaataatttgaaaaaacataaaaataagaataagaaaagttcaagaaatccattctctcacggtagtcctctatatggtgaagtatcaaataaaatgagtttatttttccatgcagctcataattcggataaaaatagcaatcaattaaaatcaccagataaaaatagattatcaacttactcaacaaatacaattactgaaaatgatatgaataaagaaaatgaagttgaaattgaaaacgaaaatgaaaatgattggaatgatggtatgtttgatcatttctcatttgagaaaacttcaacaaataataattcaaatagaatagtttcagatccaatacattctaatgatatagttggtctgggattctccgaaaagaaaataaatttctcaaattctttaccaattggtggtggttctacacataagacacaaattactcaacttgaaactgattctaaaacttcattaaatgataaaaatcaaccagctttatcttcaaatgacaattatctcaaccaccataaaaagaatttatcatctgaatcaaatttggaatctccattgaatagaaattctaatccattacctagttataaaaatcctagtcctatgattactcaaaatgtgagtcgaagtaatagtgttcattcaagaatcagtacaactagtgccaatttactacaaagggccaattctaatacatattcccaatcatcagcttcaacatcttctaaaactcataaaagatcatcatctaaaaattctaatcatgatattataactactcctaaatcttttttcaaatttttcagttccaaaaaacacgaacccaatcaacctaaacatcattcttattcatattctcaaagttcagattcttctcaaggattatcaccagtgataagctcaactgcaaatttgaaattctcagatttatctaactctcctgtaagtacttatagtagttctagcaaatttcaacaaaagaataaaaaacgtttaagtttgggagagggagaaaatcaagaatttaacaatacatcactgagtatttcaacaaatgatacaataacaagcaaatcatcaccaactgttagaaattatagcacagaaatacaatatggacagctatcacctgaattaccattgaattatccaaataaatcatccaatgaatcaatattttcagtgaaaactacaccaaatcctaaaagaaattcaatatacagtaactctaattttactacgaacaataatcccatttcatcacaatctgcaaatgcaacaccaactgcaacttcagttccacaattaaccaggttttctacaaatacatcatcaacaacaactccagtatctaacaaaagcagacaacaatctacaacatcagtatctagaacaagttcaatatcagcagcatcagttaaaacaacaaattcttcaatgtcagctaatccaacaactaaggtaagatcatttgttaaattaggttcaaaatcaatgaaatattcaattaataatcgtaataaaaaatcaatttcttgggatgaatgggatggtcatagtggtagttttgagaaaattggtcctgttggtaggaaaccaagtccaccaggtcaaactattcctgttgttactacatcaaatttacattcatcgactaatatcacaccattatctgtttctaattcagtgtctaccattactggaaataatccaactactccagtcgtggaatcaaatagtgtgcctttaccctctgagttaaaaagtgttaataatgatgtaaaggaattaacgaatgaaaaaattattcaaagtgataataaacttccattactttccaataaaaatgggtctgaatttgtattaaaggagccaataccttctaaaggttcgaagaataaaacaacagaacgtaatatcatgcctttgaaactacctccaatgattacagaaggatttgaaaaattagataaaattaatgttagtcaaaaattcttaccaaaagcaaatgaaaacacagttaaaatattaattactacaaattttgttgattataaacttattgatatatctagtttcccaagtttatccaaatttatgacttttgtatcaaatatgttcagaataaagggtgaagcgcaatttttcattaccgaaataggtttaacaaaggataaattaggtaagaaattggataggaaagttttacagttaatatgggactcgattagcaataactcattaaatatttcattagtattttacattactgcagatgaaagacttaaaactccagatcttaattctggatctcctaataaaaatgctaataaagttgagtatttaggcacctccaatgtatcatcataatgatcgtacagaggagacttcattgtacacaacttcgtcatatactaattccatcaactcagattcaagctttgatagatacttacctacacctcaacatctaatttctgtacgtaaagatcctaatgttgattattggaatgttaaagatactattgaaagaaaaccatctttgaaaagagctccctccgtcactcattcttcaatctctggtgatggaaactacaatttcagtccatttcaagtttatcaaggaagactagcaaactgagtattaattcaaatcaagcaacaccaccatcatcatacgctcagccgaatacatcagcatcatcaaatctacactctacaacttctacatctactccaccagatgcttatgcgaataaacttaaatcatcctttaaagtcatccaacctaaactgcctcacgttgattttgataataaacgttctactccattcaacacatctaatacattagttgcatcacgtcatccacctccaccaccacaaatcaccaccatgacaccaccgacaccaccaattccttcaaatattactcgtacatcaggttctgtctcttcatcagggtcaacatctagtggcggatcaaatgctgttccaacacagaccacaccatcttcaactgcacattcattaaggaatactggaatatcaagatcaagtagaacattaaagagaggtcaaatgagtattagatcattgaatagatcaaacacccaaacaagtgttttcagtaattttagttcatcaagtggggttagtgtcaatgttgatccattttcagaaaataaaatatcatttgctaaatttgagagcgatgaagattcagaagttacaagtgatgaagatgttgatagtgattgtgatgagtttggattatttgctaagaaaccgaaaagtacaggctctaaacattcaaatgattctgaaaagagtgacgaaaagaaaaagcaacggaaaaatatgttattacggtagattcgaagggaaaagcatgaaaaatagtgaagatgaagaagatgaggaagatgacgataatactgaaacttttggattgtttgttaaaaaaccaaaaatcaataagttcattgttcatgatacgagtgactgaagaattagatgactgtttctgatctttttccataaaattccctagatcaattgccggtactaagttgaatgaagttgttatttctaatatgagtaaacagatatttacaaataataacggaagtgaacatgctggtaactgatggaatatccgcaacaccaaaaaacccactcgatgatctggatagtattaacaaaagtatcgaaaccaagacgaacaatacaacttcagtagtttcaccaactatttcaaacgatgattcattagctagttcattagatattagaccacctgctgaagttttatatgataatttagaagttttttttccaaaggcagatttagatagtttagtgattgatgattccagtgacaataaacgtggtatcggaagaatgaaaagtataagaattattgcacaagaggcaagtagaagaaaaagttatagaacaccaattgctgcaattaaagaatcgcagaaacttccaaagtccaaaaatcaatttatgaattctaatagtttattgcataaaagtaatagctccttattgagaaggaaaagtacgaaaatgtggggacaaaaagttgttgaagtgaagttagatcacaaaaataagacagttattcctagacgggtcaaaaatggtgaaatcgaagagtttgcatggataaaaggtgaattgattggaattggtaaatttggtcgtgtttatgttgctatgaatttaacaactggtgatttaatagccgttaagcaaatgaatatcaaccaaaaatttttgaacgaaaaggaaacagacaagctagttgatacttttaaggcggaagttgattcattaaaagatttagatcatgctaatatcgttcaatatttaggatttgaaattaaggacaatacatatagtatatttttagattatgtttcaggtggttcaatcggccatttgttaagaaagtatggtagatttgaagaatctgttgttagatatttgacaagtcaagcattggaaggtttaaattatatccacttgaaaggtatcctacatcgtgatttgaaggctgataacttattacttgaaacaaacggtattttgaagatcagtgactttggaatcagcaaaagagctaaagatatctatacatcacagtccaaattgaatttccaaggtactatcttctggatggctcccgaaattgtgaatgatacaaatggtgttggatataatgctaaagttgatatttgggcattaggatgtgttgttttagaaatgtttacaggtgaaagaccatggagcaaatatgaaaatgaaggtgttctatataaaattggtaaagaaaaggaagctccacctattaagaaggaaattagaaaagaaatgtctagagaagctaaagatttcctcaaaaaatgttttgaaattgaaccatctagacgtccaactgcacaaacattaattacaaacccattttgtcaaattgatgaaaactttgagttccatactactaaacttggaagtatgatttatagagttgaagaaaaggagaagagtagtttgaacaagagaatgcacagtatggcaaggaaactgtaagaatagagtagaaaagaaggctgtgcattttagaatattttttttttcatgcaaattttttttcttagtattatcatttcaatcacacagttttaatctctaagctaagtctatatttttataaaaacacatttatagaattgtaatatccataaaggaaatatcatataacgatggtgaagaaatcgaaaaccatttccaaaaaggaaaagtcaaccagacgtgagaaagagaataaaaaacttgatgaactaaaacagagaattgaagatttaacaccagaagaatataaaacttacacaaactttaatgaacttccattaactgccgacttattaaaaggtcttgaacgttctgggtttgttaaacttaccgaaatccaaaaacttgcaatacctgaatgtttgaaaagtaatgatatattagcagctgcgaaaactggatctggtaagacactttcatttttgattccagtagttgaaaaactaatcttcgaaagttggtctgacatggatggattaggtgcattgataattactccaactagagaacttgcagttcaaatttatgaggttttacttaaaattggtaagtttacacaattaagtgcaggtttagttatcggtggtaaagattatgcattcgaaaaagatcgtgttggacgtgttaatattttgaattggtactccgggaagattattacaacatatggatgaaagtgctacttacaaacaaataatttacaaatgttggttcttgatgaagcagatagaattttagatatgggttttagaaaaactttagatgctattttaggacaacttacctgcaactagacaaacattattattttcagctacacaaaccaaaagtgtcggtgatttagctagattatcaatgatcgaaccaaagtatattaatgcaaatcttgccaatggtggtaagggtggtgaagaaatgtcattacctgaaagtttagaacaaagttacgttgttgttccattaaatgaaaaattgagtttactttggagttttattaaatcacatttaaaagctaaaatattagttttcgtcagttcatcaaaacaagttcactttatctatgaaattttcagaaagttacaacctggtattccattgatgaaattacatggtcgtcaaaagcaaaaggctagattagaaacttcagttaaatttacccagagtaaaaactgttgtttatttgcaactgatgttgttgctcgtggtttagatttccctgctattgattgggtcattcaactagattgtcctgaagatgttccaacatatatacatcgtgttggacgttgtgcacgttttggacgtcaaggtaagtcctatgttaatgttaatgccaagtgaagaagaaggttttgtatctcagttatcatccaaaaacgtagaagtcaagaagttaaatatcaaaggttcaaaaaagaagaatattcaaccacaaattcaaagtttatgtttcaatagtgctgaagttgaaatatctaggtcaaaaagcttttatatcatattgtaagagtgtcatcatccaaaagaataaagcagtatttcaaaattgatgaacttccattagatttatttgcttcaagtttagggtttaccaggtatgcctaaattaaaattaccaaagaaagcaacatacttaaccgatgacgcaagattgaaattgaaagaaaagaagaatgaaaatagaaaactcaagtctttggataatgctaatgacaacggtgaaatcgaagataaggataaaaaggttagaacgaaatactgataaaatgtttgaaagaaagaatcaagatgttttgagtgaacattatatgaaacttaatgctgaattgaaaggtgatgaagaaattgaagacgatgatgatttcctgaaggtcaagagaagagtcgatgaagttaagaattcagaattaccagaacttgaaataaatacatcaaaacgtgcaatgaaaaaggcgttatctagaaagcttactgcaatgggaagtgaaaaaggtgctaaacttgtttttgatgatgaaggtaaatcacacccagtttatgaattagatgatgaagagacattcctcaaacaagaaccagaaaaggtcaagagtgaattcttgttagctgaaagggagaagatgacaatgcaagatgaagtcgataaaggagttgcgaaagacaaacgagctgaaaagaaacgtaagagaaaggaacttgaaagacacatgaatggtgattactccgatgatagtgaagatgaaggtccatttgttgcaactcttggaactccacaaaatagtgatgacgaaaacgatgaagaaattccagacttggtcaatgatcttgaagttagtgatagtgaaagggcagaagatggtccagataagaagaaacaaaagaaatggtttgaatcagataaatacaaagaaagagatcaagaagatgaaggtattcttgaaattgaacaacctgaaactattgatgatttggaagcattgactttgaaattaatggagtaaaaaaactacctgtatacttagtaaaccctatttataaattaatacgcaatttatttatttacctatatcattcaaaatttagaaactacagaaaatgttattgttgatattagatgagtgtatacaaacagccggtgagaatatttaattaatatattaatgtttaattaaatcaaacataagaactgtaaccaggagcaaagtattgattatttcttctaacatagtatttctttgcttcatcagcaagccagacagtacaactgattgttattaaatataataaatctgaaaacgaaagtgcttctgtttggaaaatctcctggaagaatggaacgtaaatggcacataattgaccaatcaaagaaccaccaacagcataattaaacattttgtttctcattcccatttcaaataccgatttggtacttgaacgacatgataatgcattaaacatatcaaataaaacaaaacaagtaaaagtcattgttgtatctctacgagtgattgaatcttccatttcacgaacataaacaaacattgtacctataatgacaaatattgaacttgataaaactctatgaatgacttgcatagtcaaaattttatcatttctctttctaggtggtttgttcataacttcttcatcaaccggttcaacacccaatgattgcgcaggtggaccatccataatgatattaatccataaaatttgcattgcattaagaggatttggtaagttaaataaagttgcaagggcaactaatgaaagtgctgcaacagaagtagaaagttggaaagtaaggaaactttgaatattgttgaagatacctttaccttctttaattgcttgaagaattgtactaaaatcatcatctgttaaaaccatatcagctgcttccttagcaacatcagtaccattcatacccatcgcaataccaatatcagctaattttaaagcaggtgcatcgttaacaccatcaccagtcattgcaacaatatcacctctcatttgaagtgctttgacaattttaaccttatgttcaggattagttctagcaaaaattgaaacgtttgaaattgcgtctgcaagttgaatttcattcatttcccctaatttatcaccagtcagtatacagttaggacctacaggcataccgatttgttgagcaatattatacgcagttatttcggaatcaccagtaatcataataatatgaacaccgccatgcatcaatgattgaattgatgatctaatttgaggtcttggtggatcattcatacccattataccacaaaagattaaatcctttggttcatcttcaaatactttattggattttgcaaatgataaaactcttaaaccatctttagcaaatgaatcaactgagttattaattgattgaatgatttcaggagttaatttattaaccttaccatttttatcataataactcttacaaagtgacaatattttttcgtttgcacctttaacaaaagtttcaacattggtattgttgtgagaaccacatgaaacagccataaatttctttgaagatgagaatggtaattcgtttactcttacaaaattttctctaacgtcatataagccaaatttagacaatgattcaattattgcaatatcagttggattaccttggaatttctccttttcaactgaatacttggaattattacataagcaacctgtattcaatagtatcttaacatcatttgaaatatctttaatatgattggttgtgttcccagtatggtaagaatcatgtaagctatcttctgggaaaatcataggattatcattcattgaaacagtccaaattttattaacagtcatgtgattttgagttaaagtaccagttttatcagagcagataacgttaacggaacctaaagtttcaacagatggtaatctttttacaattgctctctttctagccattcttaaaacacccaaagcaagtgtaacagttacaataattggtaaaccttcaggaatagcggcaactgccaatgagacagaaacttggaaaacatctaaccaagatctaccttggaaaataccgattaaaccaatgacaccaataacagcaaaactgaaagcagatagttgaccacctaatttatccattgcattttgtaaaggagttttaggtttttcaatattagacattaaatcgaaaactgaaccaaatgcagtatcctttgcagtagcaacgactatacctgtaccatgaccttctctaactaaagtacccatgaatgcaatatttgaacgttcattcaatgaagtatttgagctcataattgtttcagtattctttttagaaggttttgtttcacctgttaaattactttcatcaattgtcaaatgaacagcttcagttaaacgaatatcagcaggaatacgatcaccaacactgaaatgaattaaatcaccagggactaaatgattagctaaaactgtttcagttgaattgttacgtgttaaatgtgccatttcaggaactaatttattaagtgcttcaagtgatttttcagatctatattcttgaacaaaaccaacagtaacgacaagtaaaattgcagcagtaattgagattgcatcatctatattacccattaagaaagaaacaacggctgatccaatcaaaagcataatcattggatcagaataaaatgtttcaaggaatttccataataaagattcttcctcatcagaatctaattcattaagaccgtgtttattacgacgttcaataatatcggaaggattaaccaaaccacttttcagattagtatctaattcattaacaatatcatcaattgacattgtacaatattttgaagatagtgaagttttcattctctcagtagaggaggctgaagttataatatctttctccatatcgagaaatgatttttccttgaattcttcaatagaagaagatcctccactaccactgatgaacgcactgaacggattgtccgacatgtttgtttataccagagatgttaaataagaaccgaaatttagactaaatcagaatctgaaagaaaacaatcagaatttaataactaaattacagagaagcatgttatgacacgaataataagcgactgtaagaaaaaaaaaactgaatatttgcaagctgtcaatactgtctcttaatgagttaattactgcttttaattactgctttctaattactatatatgatacaacttataatttacaatatacaattactctatatatctctaatcccttgcaatgctctgataattgcgtctttacgtttcatactgctttgaagttctgaaatttcatctcgaagttcatcaataatatcatcattaggtaatattgtgtttgatacttgatgtgatgatgatctcttatttctttcaacttcaccctccgatatccgtaatctattctctaaatgactaatgtatgattccatttcattaacacgtaaatcatattgcttaacattatctttgattttagctatgatttcattacatctatttcgtgttacacgatcaccaatctcttcacacactatatagcttaattcatcaacaccatctacattagattgtgaaacaagtaaacttttctccatttgcaacctcttcaaatgctctacttgttcattaagtatactattctctgcaacaagttcataatacaattcatctcctcctgctggaggtggtgttaatattgttgtattttgtaactctaaaatttcatttttcagtatttcattctcttgaattaacttattaacatcataatcactagtattctttttgatatttaattgtatgttttttgctcttaaaccaaatctaagagtattagtagtttcaccaatgaaattaatacctaattgcattgtacaaagaattgaaattgcagattgtccatttaatgaaggttgtaaaaatcttgttaatttagaatctctatagggtatatgtgacatatttgttgtattttctgataatttagttataactgtacctaatgctaataatgacttattaatatatgcaccctctttacgacgatcaatatgggtagttgcacgttcactacctgctaaatcacaaaaattcagaactgatgatacctgattaccattattattaactataaacacctttattttaacaatgaaatgcgatcttgatgatgtgtgattataatctgtagaatccatactacgcaaagattctcctctatcaattaattctagcagttgattcactgattcaactctaatttcacttaatcctttaactttaacaccatatttcttatcatcaactattttcaaatctgtattatcacttactaataaatcacgaattttttcattatatatctctaaaattgaacattctacaacattaacattttcaaataacacatcaattgaacgttctaagagaccacgcattgaatatgttttacccgacccagtcataccatatgcaaatatagtaccattatatccttgtaaacatttctctaatatagggaatgcaacaatttgataaacatcatcattattatcattaacatcgaaaacatgatcgtattggaaggtacctaattctgaatgttctacaatcccacgatttgaatcaattatccacgatgttggtatatcttcatatttaggccttatggaaacatgtatatgagatgaatgtactggtgaatcttgtgaaattgtagaagatgatgataataacgataatcgagatgatgaacgggaaagacgtggagattgaggcattgtcagtgatgaaaccctccttgttcgagaggaacatcgtgatatatttcgagaaggtatatctgacatagagtcagtcctcctaggtgtgttcatattgcttgttatgttatctagctttgttgttgacttttcgataaagccaagtggatcgatgatctacccagtgaaaaaaaaataatacttagctaacgtaactctattaatatttatactatagtctatttacttctatacttattggtatttacatttctgtacatccatcatggtgaacacgctactggctatatttcttactagaacatagttagctatcatttgtgaatcaatgtatccaatacaggtacatttcccatcaactagattaaatgatccattggtaaccaaccctattaaatcatgcaattgaggtagttgtgtagaataattatcagtagtaaccattttaagattttgtccactaatacctgtaaattcaccagttgaaattgttttccacttttcttcacaccccactggtacagaatatattctagcatttggtttgatattacccatgccaacacaacttaatataacaggactaatttgtaatggtggcatgtctataatattgaatttaaaaggattagaataattttgtgggataattgtaattggtttgtgttttaaaattagctgttgctgattattatcccttaattgttgttcagcacttgaaattgctgaaacaattggttgaatgtttgaaagtgactttatttggaaatctccatcaatggtttgtaaaggtagtggggtcttgttatctgtcactttggtaaccaatcttaagacttgtaatcctctccaatccaatccaaacggtgacaataattcacccttttcaccattagaaattttaactttagtataattaactcttttagatacaggccttttgttccatttcttttgattttcagttctctctaattcacattgaacaaaaccagatggtgtaaataccatatctgaccaagatatcagttttctttcatactgtagttgttcatattgttttaaaccaccaaattgaacatgtggtacatgcactaatgtataccagaacggtaaaatccaaaaccatggcatttgaacaatccaattttggcctcttttaataatcatgatgggaattttaggatctttggatgttaccggaattgattcaccaggataattgtatcttcttttacctagctgtttcaatgattgctgatttctatatgattcattacgactttcagaagagagtaaattattgtttaattgtggttgttttttaagagaaattagcaaatctagttgttcatcatatgacaacttagggtttgctggtaatattggctttgttgaatgtcttggatcagaaactgaaaatgtgaatactgtgttaggaattgtcgttaggtcactaattttatgaaggttcataaaatttgagtttggtaaacatggatgaattattgattgaagtgcagttagagattttggaccggttaactcaattgaacctaacgagtatttacaatcatcaatcgatatagttgactcagagaagtccttaatgatttgttctaaaaaagagtcatatatcgatggatgtaatgtcaacaaaagctgtaattgatcttgtgattgaatggagacaatcaaaacctttccaataggttctgtagaattgtaaataaatcctgaccaagatttgttggtatttttaataatatcaaacttattatcagtaattattctcatatagttggaaagttcatcaattttatcaagtggacagttaacaaccaatgaactatagtatgaagtatcaaaagcaactgcacctctaatacgtgcagaacgactcgtatttctataacatttttgagttggacttaaaggtatattccaaccccaacgtttacacatatgtgctcttttagcatgccatatatgagtagccagccatttaaattttctttgacgggttgcatatctaatttgatgtaaatgtgaaatagttgtaggtttatctgttgatgtattatctatttgatcatttaattcaaccaattgtttctttaatgcttttattttatcaagtaaaccggaaccttgagtagatacccatgtagaatcaggtaacttccctttaagtttccatttacttgcataattaagtaattttatcctacgtaataatgcccatctctttctacctctacctagttttggattaacaggtttacccgttgaaccaacaccttttgtagtacttactacagcaactaatggatttttagtaacaatccccatttcacgtaatgccttttttctcatcctctttggtatacgacgaacattatgagaagcggttctacgacgtaatgaacgtggcaatgattggaacacacgtgaagcacctgaagttttcgaactaaccattgcactttccaaagctttaacttcaaaatctcttgctgctagtaattccggaactattaatctactctgttgtggtaattgttgattttgttgactgcttatacctttagcaagacttttccttagttgtgcagctgttggaggaggaccctttgagggagccaaaaacgccggatcattgatttgagttctgataactctagaattgtagacacgggacttcttagcagttggatccattactatgataatatattcatgcacaacctaagagctgatcagagtcaacagtggtgtcagaaagggtttcccaaagaggaaactgggggaaaagaaaattaattttttttcaggaatttcccacagaaaaaaaaaaagttgacgaaaaaaaaatatttcaccaataaacgttattgttacactatccaatgacttgtagttaagtttagccttctttttaaaagacttgtttcgtaatgactatatcacttaacgctacaccggaaactgatagaggctccttggaacagggcggaactacacatatgagtaacgacactattcagttcaaacattacgcaagagatgcaccaaattacccaaccccatcacatacaccaacaagtactaaaaatgaacaaagtgaaaatgaacacgataattatatcgaaaatgatgagaataagagtccaaaatcaactaaagtatcaaaggatataacttcaaaggcaccaagggactttacaccaaaggaatttaatacaaaagattcaaatagtaataatgttgatgagaacggttacccatttttaagtagagaatttgttgttcgacgaatctcagaaggtgaaactggtcgtttaaaggaagaacttaaatgtgaagcttgtggtaaaggttataaacacattacttcacttgctaaacatttatgggaacatacagctgaatggcaatctactaaaaggttattgatttcaaaacatcaacaagctcaacttcttgaagctgcaagtatcttatgtagtttcaatgaaaatgataataatagcaacaacaatgctaatgctaataataataataataatacaaatgcagtcgcaaatggaactactacagcacctaataactatcttaacaatacccatgcttcacttacagcacgacgcaaaagtcgttcagatggtccatcaaagacaggtaagtttggtggtaaacgtcgtacaactagtataaatcattcaaatcgtcggtttagtgaagtggaatttcttcgacgtggtagtacatcaattttaccaccaagtgatataagagcacgttctggttcaattgttgaaggtgattcagtattatatgattctgaagatgaataaatttaatttattctatttcattagctatcttaatattgtgtgtatatttctaaatattataaattgagtttattatattatattaatcattaacgtaattaatttagttaaaagtagtggattcttttttttgtttctataagtaatttattggtttttatgatatacaaagtgtttaatgtgaatttagttatacaagtaagaatgactctaattttctctccattgatgagcacaattagtacatttatagaaagttgtcataggttcatcagctgaacgaatttgaagttggaagaaataagctctatcattaccacaactttcaacaggacattgagcagcagtttgatccacattatcccaagcacctgcacctccaagaacatcatctacttgtttacgaggtaatgattttctttcaaacatttgtagtccggcaattggaaattcatatggacaagttggacagacaaaagcatttgaagctgaagttgacgaagctgaaacaacaagcatgttactgcaatagggacaaaacgttagcattgtgataatatatctatatagcttctatactatactctctactgtatccttttgtattaatacacctcttattgaaagattaaaagtaaagagaaaaaaatattttttgtgaggaagttcctgcagtggtagttttcatgttgttgatgaaatattattattaactaataccggttagttgctgatatacagtgtttgttaataaatctgtttctcttttaattttctgacttacaagatatcctttatagaagaatggctggtaaacctacacagactcctccggcttttgcctttgatcttgccaactgggaagatactcccgatttatcctttctcgtagatggtacaacagatcattctaatactcaaaatcagaatatcgattattcatcacaattacaacactaccaaaacttacttatggaaactcaaaacttgttgtctatgaaaaaaaacaaaccgaataaccaacaatcaaatgatacaaatattgctcaacctcaacaaccattgtcccaacaacaacaacactctcagcaccaatctcaacaatcatcattgcctttaccacaacaacatcaacaactacaaaatgagttattttctcaacaagaaccagatcttttacaacttcaaaactttcaattacagaatcttcaaaacttgcagaatttacaaaatctacaaaacttgcaaaatctacaaaacttctctaatattccaaatataaataatatccctagtaatgtacaaagctctcaaacatcaccaaatgtgccaaataatgagaatattggttttcccaatttacaaactctccaaacattacaaaaactacaatcactatcgagtaatcctgttgcaattcaatcattcataaataattctttgattaatcaatccacttctgataatatgaacatcagcacgtctaatacacctgtaacaacgcccaatccaacagtatctcaactacaaagttcatcccaacagttacaacaatcacaatcttctgccaaaaagtctgaaccacctcaacccagaactaaaattagaccatgtgatcattgcagacgtcgcaaaactaaatgtacaatgataccagactctcatatttgtaaatcctgtcaagctaaaaatctgaaatgtacatttaatgaaactacagtgctcaaaagatcaataaattcacttgattttgataataagagaatgaagtttgaagatccaacaattgaaccgcctccaaatattcctgtacgtaacgtacctccaataaaagattattccacaatgcaaggtaattcacttttgaagaagacattaagcttacaatttccacgctcatctttctatattggtccaacttccatatatgatccattattcttgaataaagttgctcttgataaaattgatcaatttcaaattgataaatcaaaatctataaggaaagtcgctaattctgttcaattcttacttcgtgatgattttagtgaattattatatgaacaagctgaaagagattcagacattgttgaaaaatatattgcgccacatggacaaacattaattgatctctatttcaaatctttccatccgtctttcccaatcttacataaaaaaatattcattgaaaaatataatagaacacaccgtgagtttggtgctccattgttagcagcagtttatcttttagcaatacaatggtgggattatgaaccaaaattatgtaaattaccaaaacctgatgttttatcacttcatagatttgcaatgagaacttttgttgatattacacaacgacctaaattaagtgcagttcaagcaggtttattattactacaatgtcaattaattattgataaaaacccacaattatcagcaaatagttcaaatgtaaattcaacggctaaaaaaagtaaaaaagaaatcaaaaaggaaaaaatgacattagaaagagaaattgaaacacaaactcaattatcgaatcataacaattggttattatgtacacaagttgttgcattagctgaagaattagggttaggtttggattgttcaacttggagattacctaaatgggaaagaggattaagacgcagacttgcatgggctgtttatgttcaagataagtggtcttcattagttgaatcaagaccttctcatatcaatgaaaatgtaaattggattgttaaaccacttacagacgaagatttccctgaaaagaatacctctaataatagtaataataataacagttccgaatctgcgttaaatacagatttgtcattcattgatattgaatcaggtaaagaagctttcaaacatacagtatcattaagtattatattaagtgaaatccaatctcagttatatacaccatttgcgatgcaaaatatctacttaattgatgatgttttacgaattgccaaaccactacaattaaaattaagaacatggtatcattcattacctaagatattacaaatgaatgcatctaatgagctaacaaataacgaaaattcaaatataaaatcatttcaagcgaatggtaatttacaattatcatattttgcagctgaaatcactcttcatagaagaataatttctgtgttgtataatcaacaacaaagaagtgatattactgcagcatcaccagcaaattcaaatagtaatacaccaatggggtcaccagcctcatcaacaactgcaagtgcatcaaattctcaatctatgttaccaccacctgcaccacaattggttaaagtttgtagaaatgcagcaaaaacaagattaacagcagcaatttcatttattagagaattaacagttgatcatatgcacaatttctggcatagtagtgcacctagaaatttagcattaattggtatttttgcaacattattatatgttactagttcagatgcggatgaagcatcagtttatcgtgaatatttaatggattataaatggattttaaagatgaatatttcaaatttcaatattgctaaagaagcattattattaattgatggtgttgtccataacatacctggcttattgaatgattatgatagtcaacttgatacattgaatgaatttatggttggaaaaataaatcaaaatattgatcaaactgttaatcaatcacaaaatcaaaatcaaactcaaattcaaaaccaaccacagaatataaacacaaataagataaataaaaactataattatgatatttccaatggtgttagtccaagaactattgctagtcctggtaccaataagttcaaacttcctaataataccatacctaataattcaccatatccatcatcaccattaaacagtatgacaaatagtaatgtaggtacatcaatacctggaaaatctgggccaaaatcaagacctaaatctccaatgattatgatgaaagatgcaaagactccaagtgttgttaattctccaatgggtacaccaactccaacattactttcacagacacaatctcaaccacaaccatcagcagaatctcaatcacaaaataacgataaagatgagaaagctaaggaagaagataaaaagtcggagaaatcatcacctaagaaagcactggaaatgtttcaatacgataatcagcaaagtttgatgaatatggcatctatgtttggaataagttctgaagttgaaaaccagatactaaatcataataacaataataataaaaataataccaccaacaataacaatactaataacaatactaataacaatactaataccactatcaacactaataacaccactaccgatggtaatgacagcagtgacaatagcaaaaatggtagcaataaccaagaaactggtaaataactgttaaataacactgtataaatagctaattgatgtaaatacttacgtaatacattatataatttaaaaatttcttttttttctatggcaccattaataacgaacatcctccccaggggtataataatataattgcaaagaagtttaattgtgtctcttgccaagaaatgatgcataatagttgatctttttcgttaaattacattattctttcttttaatttgtaacaatgtccgttaatgacattgggaagttattatttgctggctttgaaggtgtcgaattctcagaggatggtcaagccgcaaaacttatacgtgatcaccgagttcactgttttctaattaagagacataactatgttaacattcaacaattaaaaactttactaaatgatttacaagcatttgcatataattgtaattttgattcaccactagctctatctattgatattgatttatatgatcatatgcgtgatcaaaatcttaaagaattaacagtctttcctccatctcttgcatcatctgcaacaggaaatttcacactttgttacaatattggtagagcagtaggtttagaatttaaagctattggttttaatatgatgataggaccaattttagatattttctataaagtctcaaatagtaaaaagggtattaatacccttggtgctactgtagacgaagtttccaaatatgctgtagcttttggatgtggtatcaaatctgttggtttattaacatcgggttgttcatttccaggtatgggtaatacatcaattgattcagttacaaatgatttaatattagttgaagattataatcaaattgaaaataaaaatatcttaccatttaaggcaatgatcgaagttgatgctttagattcaatcttagttacttcagcatttgctccaaatgctttatacgatgatttaagttgttgtttgaatcctaaaattgttgataccttactaagagagaaattagattttgataaactagttattggtggttgtcttgaaacttatgaaattatattaaactatggtattggacaagcggctgctttatccattctttatgcacattgtgatatgatcacagtttgtaaatcttataaacatcaattagaggctttagaattcttacaaaaatcttttgagcataataataatcaagctattctaataactgcattaagaagaattgatgaatttcttaataaaataacttggtttgattcaaaagttgagattacaccggatttaaagcagaatcacgagaagctgtccaatgatgcatatagaaattcaatctctttagttagagacttatatggtatggttccagcttggaagtattttaaacaatattcatttaattttaatccaatcgatgaacttgcaccaaatgataaattgattacaatacccaatttggataaaatgatacgatcagataacataatgacattattaacgccaacaaatttaccagtttacaaacagctagttaggaatttaatagaatatggtaaagattgtaattgtattgttaatcattttgtttacaataattatgaaataactaaagaaataaggttggcactagaaaattctatttacatcgtcgttatacaaacaaatgaacatgaaatcaaaataattaaagaaatttcaagacttttatcaatgttaagtaaaaaattaatgattgtatcagttaactcaccttattactttcttgataatgatacaattgcgggtactttcatatcaacttatgataactcaccaaaggctctaaattatttagcacagttaatttttggtaaattccgtgcaactggtagagttcccggattttacggtaagttaaactcacgtgaagaagttgttatgggattatccaacagtttagatagttctgagtggcaatttgactttttattgaataagccagcaattgcaaaaccattatccaagttatccactccaactaatttacaatttgaaaataatatgtatgcaaatgaaatttctgcattattaaatttagatcaagttatgttaaatcataactccaatcccaacacaaatcaatccctttcctcaatagagaataatatgatggcatctaataatgcatcatcatcaatatttgattcaaactataaatttgactccaacagtgataaaccaaaggatactgtatctgaattaaattatgagattgatgatgaagatggagaagattataatagaactaatattaaaactgaatctcaatcaacatatgatacgtataataggaaacctagtgtggtaaataatggtagtaattcaaaccgtatcaaccccaatatacccagtgaagctaataataccaatcgtaggaaaggcaaatcagcatataacatagttaatagtgaaaaagaaatgtcagaagaaaataaaatcaaagaaaaaccatgggttgttgaagattataacgatcgtcgtgataaatcattttttggaatgattagagaaaacactattaatgatatatattatcctttgaatagtggtaatggattaattggacgtatttgggcatacggtgatagatacggagatacgaaagtctcgttcattgttcgtaacccaacattgaatgttatttatggagtggttacagttatcattgatgaatatagtaaaactggtagagtgatttacatggttgtttccaaagctaaaagaagacaaggtgtaggtgaaattttgcatagaagagcaattcaatatatgacgattgttagaggttgtacaacaattgcattaggtagtgttttcccattttacaattatttagtacctaaagttttgaacgaaattagtagtatttggcaatatttagaaaccaaagatgattccaaaattgatatcgatgatagttctattcagttagttggatttttccgttcattaggctggaattatacaagacataccaagggtgtttatcaacaaactagaaaatatttattacacttaaaattgaaaaattggagattcccagcggagcaaagtccttttattgttaatagtttaaacataaagataaatagcacgtttgaatttatcgaacagttgaacagtttaaatgttaaatttattttaagtaatgatcctggaccaggttttgaaatttgccatcgattgcttaaaagtggtaaaacaaatgatgatgaagaaattgtattttcaacactctattctaaaactaaggagtttataagaagagagattgaagattataaattacataataaaagacgaagtactatggcaatgtatgcatttgtggatggtgtaattcaaggagggtgtatcatatacacgagtaatagtgaaatgggtttttactatccattaattgatcaatataagaaaacaccagctgaaactgtagcgggtatcacaggtgtatttatcaattcactggaggatgataaacaattaagtccaaggaacaaaaagttaattcaacatggattaatatctgcatgtattgatacaatcggtaaattaggtattgaacaattgataattcataatataagtaaagaaactatgccagagttattatcgtgtggatttgtgaaaagtcttgaatactgtgcatgttttggtaaaaagagggcatttgaatgggtcgtatagtatggtatagaagggtatataatattaatacaggaaagttatatagttctaatcttatctctatgtagtgtcttcttcaagactatccagtacattgttttgatcatcatcaattgtactgtttagaattttattatcatctttgatatctctattattattattactgcgtatgccctaaataactttcatcaattgatgtttcgttttgattgtccgtttgagctgcaactgctgcagctgcagctgctattgtttcaaaatcagcatctaaacctaaacctttgaaatcttcagctacaagatgtatagttgttggatcacgtctgagcattttggaccaaaaggaagagatccgattgaagagtaagtatataaattttgagaacatgaattttttcaacagatcaaaaatattcaaatttgaaaataatgactttttactaatatgtttcttcttttaccaacaaacaacaatgttcttagttatagtctttgtgatggtagtgatggtggcaattacagttgtattgccacaaatttctggtgttgctagatacacacataatccagattacgatgctaaaaaaagagagaaaagatcatcagttaaatctgaacaacctgaaattcaatcaaatgtttacagagcaccagacgaagattttaattctgataacattgattcagctaaagtaagtggacataatggtagatttggtgtacgtgcaacaattaagaaaattgtccaaactccgataactgaaagtgatatacctgttaaattagaaatagttggtgaagaaactttaaagcgtcgtgtaagaggtgaaagatcaagtgggagagcagttactgatcctaatagttatgattttaatattgatgattttattgaagaagaaaataagagagatgaaatggagagaagaaatgaaactcttaaaatgtatggtaatgctgatgtttaatgttttctaacgtatatatatatatatatatatatacatttagtacagttttatatataaaaaggtgtttacaaattagcctgtatattagctatttgagcagcagattccgaatcgtgtgatgattctgaatgcatcggtacattagaggaattcttctatttttgtttcagaatcggatgtagagttagaatcgatttcacctttatctttatcgtcaccatctgaatcggatgaatcactttcggattcactttcaggtacattttccatacctaattcttcataaatatcatttgaatcagtaccaatttcatagaatagcatataagtaccttcactatttaaaacttcatccttagtgacaattctaacagtctcatcacttatataccaccaaattccacgaattttcttatagcaaatataatgaccataattatgagtaccataatgagatataactgctttaagtgaataatttaattcatctgtttcattaattttgaaactttttcttgcatcaaggttaatattacttggttctgcaatataatttgacatatttaatatcattggaaaatcaacttttgaattatttttccttattctataagttgttggatcaaaaacacttctattaatatgaatagttaataatggaggaggtcttgcaaggtatgattgtttgattttacgacattttataattgaattttttgtatgtaattttttataaatatcatcattaattgaattaagttttaaaacatcatcaatttcatcaattctatttgaaattttttcaataagtatgtttgcactatttgattcctttaattgatctaatttttcacataaattatctctcatattattcaatccacatctattacattcaactccatcaattacttcagttgatgtaaattcatctaataaatcagttaattgataatgattaaattgactacttggcatatttagtgataaaccacttaaaacactaaatcttataccaccaatttcaccacattctaaacaaccaattctatcacattgaataccatcaactggtgtaattaaattaaatggaacatatttatctgattcgattgaagtatcaattaaattttgtggtatataaactggtcctaaagaatctaaagaatctaatttttgtaaaccagttataccattttcaggtaatgaaattgcatctttatttggtttttcatttagtgttgatttgaattcaacttcaatttgtttcataacattttgataaaattcttctgcatcttcttgattataacctaaaaataaatgtttatttggtgaatctttcattgctttcaaaaggatttttagtagtataaggttttagtttttttattatttgaattcagttcagttgatttataaggttatttagagcatttgaaaaaattaacttattatttgaatttgaaactatactcatccagaaaatttgtaaataattgtgaacttgataatgattgtataacagagttcatgaaaacatgtattaccatcattttgtaaacctgatggtataccaccattctcatcatttgaaataatgtaattataaatttttttcaattttggatcaaaatatgttgaatctctattctttgaattaaaaattgaccatgaggaactaaatttattcattattggaaaataaacgagtgatgatgataatataataagaaataaagtaaatactacttgttaaaacgtttaagttttccataatatatcaaggaaatataaattctgaaaagaaaaaaaattgtcaaatatttgacatgaattgtactgtatattattttacaatttgatagaaaagcgtgaaaatttttttaaaaaatggtatacagatctttatttaatcctacaatcattgaatgtctttatacttacatgcatgtatgtaaatattgatacagttatttatttgatcttgcaactttagcagaatccattgcaactgaaatacaattagtttcataatcatcaattgatgaaatatttggatcaaaatttccaataacttccattactaaaggattaatacaagatttaccagaatctgtataaaaatgtcgtcttaaagcatcagttcttgcaaattttttaccacaaccccaaactttcgaagttggagttaaaccataacatttgaattttttttcacctgaatgtaaatcttcatgtcttttacaatcatgttgtcttgcaaaagattttgaacaaaatttacatttaaatggtctatcacttgtatgagttttttgatgagattttaaattataaggtcttgcaaatgatttaccgcaaatttcacattgatattccaattcattttcttcattatcattatcattatcatcgttattatctccattactactattagtattattatcaggtaatggtgaataaattgatgaaagtgatgaaaatgaggaagagtgtgataatgaattcggaggataaagagatggtgaagtaggtggatataatgacggagaattcggagataatcttgaaggtgatggaccacgagaagaatttcttgaagaagctcttgatgaagctctagaggaatttctggatgaatttcttgatgaatttcttgataatgatctacttcttgaagataaaactttacgaccatttctcattaataaatgttgatcatcagttggtacggtaagtatatgatttgaatttgaaggtggagttggagtattaataaaatttggttcagtatcttcaacacttataccaatttgaggataaggtacaaaatgattatcaaataatgatggagtatgtattgaagaagtgtttgaattattagtatttattttatgtaataaatttccattaaattcatcattattattagtatttatattaatattaatattatggtttatactataattattgtaattgttataattatcaatatcataattatttacaaaattattagcacttatgctatcaagattatttatatcaagactatttatatttatttcgttggataaattgagggtattattgacaatgttgtttatatcgggattattgatagtatttatattattgtaattgtaattattattatcattagtatttttatgattagatgtatcggaagtataagatgtattagatgttgttctattgatattataatcgttatttatatttatattgctgttgttattattatcattattgttattatcattttcattatcattagtattattgatattaatgagggattccaatgaatttaactgatcgaggggatcactgagagagccaagaaaggcttcaagatcagaattagaagtggagaaaggtggtgttgccattgcaacaatagaaaaggttggtaatattaatattaatattaaattactttaggtaaaaattaatttattatcgtcataaaatacaatacggttaaatcttggctatacaatttgctattagctcaaaaaatgaaaatggaaatggaaatgaaaatgaaagtggaaataattaattaattacataagctctgagacgcgactactgtggtggctcaacattagaggaacattgaccaatatagtttccaggtggatcataggaacagataacataatctccccaataatcaccacaacttttaactgcacaacctaatttagttgttgatttccaaataacttgagtgaaatgatctaaaactgaacatgatgaaccataattataatttgtaccttcattataccaaccttcaactgcaccttcaattccataacctaaagctaaattttcaccatatggaccaccagaatgagttaaagtacctgaacaatcataatttgatgcataattagctgcataagctgcaagtgatgcatcccatgataatgcaggtgcattatgtaatgaacgttttgcattatgagcatttaataaaactgtcgcattatcatcaccagatgctgctgcagtggtagttgcagcggtacttgcagctggagttgatgtagatatagttgattcggtggtagcatcttgtgtagtagttggagtgattgtatcctctattatagttgaagcaggggtatcatttgtagtacttgttacaatagtagtaggttgtgcagttgttgttggagtagcattattattatttttattaacattatcctgtattatagtagttgaagtatttggatctattaaaacagttgtaacaacagtttcaataactgttacttgtaaaggagcggcaatagctaaagctaatgaagataagagtgcaagacgcattatttgaaggaaaagaataaaaatttcaggaaggtacttaatttcattttaaggatataggtttagctttatagaagatatataagatactctaagagtggaatagattgagattaaataagataatattgaattaaatttaagggtactggaactctatgacacgtcaatagcgcgttgtttatgtttcaaaggggatatagcgtgttttattaaagtgatactgatagatatacataatccaatgtattacataatcaacaattttccttctacttctacagtcctatcgacgcacagggaaattagaaaaattgaaaaagcggcgtcgttcaaaaagcgctcagtggaaagaaaaaaaaagatgaaaaaaatttacaaaaattgctgtgcctccaatttcaacagctgaacctccaataattcattattataaacactggaggtattgttctatatacattttgaataagtgtccctttacaatataccattatgaccatgcctttaccactacctgacgcccttggtgtccttgctgcagcttctgcttcggcctctgcttctgcatcagttgctgcttcaaatgtaccttcaaatgaacattcaaataatacatcaggacaaaattctccacaatttcaaaatcaaaatattaatgttaataacaatatctcttcatcaaatcaaatacaaaactcatcatctgaacatcaagtattagaggctttaactaaactacgatcgtcatcatcttcatcatctgctaataataataataataataataataataataataataacaataataataacaataataatagcaccacacacaattcattaccacctgctaaaataccaatctcacatttattagaggcaacattcattaactaataataatacaactaaaataacaaagaaaactcaacgtaaacgtttgcaaccaacattaccaaaaagtttcccttgtcctcattgtacaaaatgttttacaaggaaatcaaatttagatagtcatttaattacacattcaagaaatagacctcatatttgtgattcatgtaataaagcatttgcaagattaagtgatagaacaagacatattcaaacaactcatggaccttcaagaattttccaatgtagaggttcaacttcaattaaaaatttaacaaatttaaatgaatggggttgttcacattattattcacgagctgatggtttacgtaaacattttagatcacatgctggtagacattgtcttttagcttttattgcaggtaatccagaaattttcaactacaagtgaaatatgtaaaaatcctgaaactgcattagatgatccaaaacttgttgaattagctgtacttaatgttagaagtcattgtggatggtaagatgagtgaaatttataattataattattcttataattattatttatccattgtatagtttattattactctttatttgttatcattaatatatctgaaaaaccttaaagaaacctttcaaccgcaaggtaatgaaaatccgaaatatgcggttgagtcatgtccattccttcgccgcactttacccacttaacgaaactgtggctcaaccggtgatttcgttaacttccccctattgttcactcggggatgtggagtaaaaaaaaattatttttgtttatcctatattatatacttattactactattatgaatcaatgaatcatctgttcggtaaattgaataataacttttctgttttttcagattaattttcacctatatattctacttctacttcctttctttatgtagcaatgactacaactattgcaacaccggtatgttatgcctttcatcaagttgacttattggctcaaaaattacctactccaatttataaacctttaaaatatattttcgattatgctgtaaagaaatggttctttgtaggtttagcttgttttattgccttaggcctaattcttatcctggtgcaactgatggtgttcacatagattattgggcagttgcaattattttctttatttcaggtttatcaatttcaacaaaagatttattatcaaatttatattatgttcaagctcatatatcaattttaattatgtctttcctaataacttcttcaatagttttcggtatttgttgtggtattaaagctgctaataatgatgcaatttcaaattggatgcttgcaggtttaattgttactgcaacttgtccaacaactgtttcttcaaatgttgttatgacaagacaagctgatggtaatgtcgcctttatgtttatgtgaagttattattggtaatatgttaggtgcttttgtaactcccgctttagctcaaatgtttttaactggtacttggaattttgcaaatcctgcaaatggtacttctgtttcaactgtttatagacatgttatgatgcaaattggtttatctgttttcgttccaatgtttgttggtcaagttgttcaaaatattttcccaaaacaagttaaatggtgtttaactaaattaattttaaataaagttggtacttttatgcttttattagttatgtggtcatcattttgtacagcttttagacaaaatgcttttacttcagtttctcataaatcaattataatgatttgctttttcaatttaggtatttacctattcttcacacttgtttgctttgtttatgcaagaccagttttccttttgaaaattttcaaaaatgaaccagatgaaaaatcatcgaaaacttataaaatattatatcatatttttagaccattttattattcaaggaaagatacaattacaattttattatgtggacctgctaaaactgctgctttaggtgtttcattagttacatcacaatatggtttagataatcctcatttaggtcaattgttagttccattagttctttatcaagcagaacaagttttcactgcaggtatgttagttccttatatgaaaaaatggattcatgcagaaaatagtgaacctgaatcagatattgaatttggtataactagaactgaaactagaattccaggtataaatgataatgaggaggttgaaggtggggataataatgataattatcgtgaaaatgaaaatgatacaactattacaaatactgaatctaacataactgaagatttatctaatgaaaagcaaaattccatataacataattaataattaataattaatagtataattaatagtataattaatagtataatttataataatattttataaataagaattcatagaattttagttaaatcaattaactcatcaatctcataattattaaatttataatcattcttcaaagcaaaatctttaatacataattgaccaggacaactcttccaatgtttccttaaaccatctttacgtgaataaattctaccacaaccccatttaccattttcattaatttcaccacatttaaaagttgtctttaaatgtaatgatctttcatgtctattcatatcactacgtcgtacaaatcctttaccacaatgtttacaaatatgtggtttaatatctaaatgaactctaatatgtgaatcataattagatttacgtgggaaaattttaccacattcacaaataaatttaccaactttatttaccttatttgaatttttcaactttgatttgattttaatgttagatttgcttgacttggtctttttagcctttgtagttactttaacagttgtatctttcttttcctcttttttgacattttccttctcattcacattttctttctccttctccttcaccttcaccatctctttctcattatcatccttagcagtttcatcatcttttacttcttcattgatttctttcttatcagttatcaatttccatttcaccatcattaataacaacaatacctaaaccaaataagtgttcatcagaacaataaaaatcacttttatttaattcaatatcgccatcatcaatttcttcatcattatcaattccattatcaatatcattatcaagttcattttcattatcaatatcattatcattatcaatatcaatatcaatttcaatatctaaattttcattttcatattgataaattttgataacttcttcattattaaataatgtattaacttcgtaaatttcttcaacttcatccaaattatccttatctaatcccatctctaaatcatatccattaattgtcatatcctcctcactatcaaattcccatttataatgagttgtatagtgagtttcctcatgaccataagtaagtatattcatctctatcaattgaatatatgctaccttttaaatgaataacaataaataaaagtagaataatccactctcttttataaagaaatctctaattaactcctttgccacccatgttatcaattaatcgattaattaattaattagaactgataatcacagttaaatcaccaataatcatcaaaaatagagagtctaacctattacggtaattttaatgatctaattctcggaattacgtaatgttttttttattttttattttattttattttattttattttattttattttaataattctacattttacacaattatttagtaataaataactcttcttctttttttttcttttggcgtttaatttaaaatattataaaataaaacaataatatagtaataatagtagtagttttaagtataagagtgtctatatctccttttccagttgaaataaaaacattgaattaatttatttaatataaaaaataattatatcaaataaattagaaacatttatgatgaacaattgatggtcctgattcatcatattcttgtttagaaatccacatttgttggaaagttgataatgatgctaaaatagaaccaccaatccaaactgaatactttctttcaggtggtgcaataattttaactttcattgatgatggtgctaatgcagtaatttccttttgcattctttctgcaatacctgggaacatagtagtaccaccagacataacaatattaccatataattcttttctaacatcaacatcacacttcataatagaattataagtagtttgatcaatacctgcagcttctaaacctaaaactgatggatggaataatgcttctggtgctctaaatctttcattaccaatagtaataacttgaccatctggtaattcataagatttttcaattgctgatgattgtgaagcagtttgtaattcttgatcataatctaatgcaacataacataatttttctttaatatctctaacaatttctctttctgcagttgttgagaaagtgtaacctctttcagataaaatcttcattaagtaatcagttaaatctctacctgctaaatcaattcttaaaattgcatgtggtaatgagaaacctgcataaattgggacaacgtgagtaacaccatcaccagaatctaaaacaataccagtagttctacctgatgaatataatgataaaacagcttgaatagagacatagaaagctggaacattgaaagtttcaaacataatttgagtcatcttttctctgttagattttggattcattggagcttcagttaataaaactgggtgttcttctggtgcaactcttaattcgttgtagaaagtgtggatgccagattttttccatatcatcccagtttgtaacaataccatgttcaattggatatcttaaagttaaaatacctctctttgattgagcttcatctccaacataagaatctttttgacccataccgaccataataccttgatgtcttggtctaccgacaatagatgggaaaacagctcttggtgcatcatcaccagcgaaaccggctttacacataccagaaccattatcaatgactaactgttataaattaaaaagggtagggtttaatgttagtattttgtttataatgatatgatgtaataaatcatagtataacaataataataattaagaattcccgcgaatgaaaacaacaaattaagcaaccccatttgaaaaaaagttaaattttctaaacaggtggcaagtcggtttcatttttagagtgaggaaattcttaattaattattactatgagaattgtattaggtaaatcattttattggagagatggcttagtttatacgattgatttctttagatctcaatgtataccgatatatcagtatggtaattgtaattgtaattgtaatagtgaattattatctaattgaaaatcaattcactctttaatgtatgcaatatagtaattaataattaataatagttatgaaaagctattaattaataattatattcgtagatttcctaacacaattctcatatgatttaaaagggggggggctacttactgctgcaatatcttctatataaggagttagtataaatattctttttttaattgaagttaacaatttaaatcaaaagactcaattgacttatttccgttattataatgagatgaggtatatggatcaacatcacctaagctgtaataactaatataaaaaccaattaaggtatatagaatttgaattgtcaaaatagtttaatattatacgtaccaatgtttgagttatccattatgtttaattatttatgttgtctataagaataaaagtcaagaggaaatagattaagaaggagggcgaaacaaccataataaatagaaattggaaattgaaattgaaaacaacgcttctttggacgctcttaataattttcaatctatccattacacagacgcatcgactcttatacattctaactatctattaacactatctatatctaaccttttgcttattacctctcttttcaagcttttcctgtcttttactcttaactggttcaccatttaaaccatctgtagttgtaggattaacattacccttattttttgatgggaaaaacatacccattatcattgaaattataccctttaatttccaaattgcgaaaattggtataattaatagtaaataccaaactttcatactaccaaataaaatcattaaaatatcaattaataatgttaaataaattatatcaatcatatattctgttaatcccgattgttgtaaatcatctcctgccttaattaatattttatatccatctgcattaataccatattttggtctaccaatcttttcaattatatattgacaaatcattagtggaattgaataaataaaataatattttttaccattttttggtctaccgattaaaaaaattgagattaaaacaataaaattaattatacctgataatttatgaattgatgataatgtttcattatttctttgtgcttgtttcttctctgctgcacctgccattgtttatctttaaaagaacaccctaatgatcaacttgttgatgattacattaaagttgttgaaaaattaatgttacagataattatatctgtagttacgtaatcacctcgctatcattaaggtgtattggtatagacctcaatgttaagaacgatataaacctatgtagaatcatcatacaagacaaatattatactactattattattataattactattatataaaatacacaaaacaaaatattatattattaataaaatattattaatttaataagataaaaaaactaatctaacaacaaccaccttgttgagaattaactgcagtacctgttaaactaacatttggtttattattaacctcaggttgagaattagccatttgttccttaatttgttttgacattaaaataaatgcttgttcaacatttgttgattcagctgctgaagtttctaataattttaaacctcttgaatctgcaaattcttttgcgactgcataatcaacaacttttttatcagttagatcacatttattaccaactaataatttttgaacattacttgtaccatatctatcaatttcttgtaaccattgattaacattatcaaaactttcttgatctgtaacatcataaacaattataataccatgagcacctctataatatgatgatgtaatagttttaaatctctcttgacctgcagtatcccaaatttgtaatttaattgttttaccatctaagttcaattgttctaattttaaaatcaactccaattgttgaaacataatcagttgtatatgtattctctgcaaatctaagtaataaacatgatttacctaccccactatctccaatcaagagaagtttaaaaagataatcgtagtccttattcattatatacaatcccttaccctaaagaaaataccctaaacaaccattaaacatcaatcaattattaaaattcgcccctactatataataaaaagcaaaaggcaaatttcatattattttattatgtaatcgtttcttcttatattataatgatagtaactacatgtatacaacccttttacaaccgccttatagtatcttatatatcatccatcgcatttttgtgacacgtcgtattttatgtctaacatccctgcggtgatatctactatgaacaataggtaaatgataataacagatataataatgctcatttacattaataaatagataccgattgcctatttaggaaggtggctggtttcatgaatccatttttgataaagattaagatatatttaagatttaaactttaccagccatataaggtacatttcctaaaatagaagaattataacccaggtatctggctgggttacattattttaatttgtttcaaattatgtttcatcatttgtatagtatataacttaccagaaatccttcgtttctaaaattaaacatattttactaaataaaatgtttgaatggttaaaaatattttattaattaacaaattcttttaacaaatattattaaatatttttggttctggtatatacttcattatatacttccaatataacttactatattatattcaattcaaattcatcgatttatagaacttttttcactttcttttaaacacattaattcttttcttagctcagcttttcattgtctaattcatataactgtatcaatcaatttacatattgtatataatatatcaattagctcattgcatttttattttatttcattttatcttagtttactaaaaatatattttatgatatcaaacccatatttcaatcaataataatcaaacaaacttcagtcattcactaaaaacttattaattacaattacaaatattatacacatataaattatgaatttccaattagataatcaaaaaacaagaagtttaaaacattcaacttcatcatcttcattacttagtcgtacaaggaaattatcatcagaattgaaaatttatagacctttaaaacgttcaacttctttaagttatagaacaaatataccaaaaactacaactataaatacatctaattcaacaacgataaaaaccaatataccaaaatcaaattcttttagagaattacctactccaacatcaccatcttcatcttatggtaaaagacttacgagaaggtttaaatcattgagaaaaataagtacaaatacagtttcatcatcaagtacattatcaaatatttcatcaccaattttcgatccaaatattaataatgaaacaataatttcaccaccttcaagtccatcacaatcaattccaagtccaaaaatttcatataatgaagatttaattataactgataatgaagatgaatttgattcatcattttcttcaatatcaagagatacatcatttaatacatcatattcatcaatttcctcttgtgaatcttcaccaattaaatctaaagcattattcaccgactacacattacgtcaattaaaagttacaactaattctgatgatttattgacattaaatacatattcaacaataacttcattttcaacttcatcaaaaatattcgaaatacctgaaattttagaaattattttaagatatgtttcaattaataatgatgaaaagaattcaattgaaccgaaaatgtatcgtcgaccaccattatcatataatcattcgttattaatgtatggtaagaataatggtgagaaaatttgggaaagaacagtatctgaaggaataaattataaagagacatctggtaatagtacactttataattgtttattagttaactaaacaatggaattatcaaattaatcaaatattaaatgaaaatttaattttcaataatgatgaaaaatttgaaaaatttacatcaaataaattacattataaggataatgtaaatgaaataattgaaccaatttcaatcaatttaaataagattaaatcgccaaaatcaatttatgaaatatttgaaaataaattatcatcaagaagattagagaaaattgaatattatatttgttcaaattttttaccatcaattaatttaatttcaaataatttgaaaaagctaatacttccaggttgtaagattttaaatgatgataatttaaaaaatttgataagtaaatccccaaatttaatacatttagatattagagcttgtgattcaattactgattcatcaatttattttattgccaataattgttccaagttggagttattaaattgtggtagacataaaagaggtgaattaatttcagatatttcaattggattaattgctaaaaattgtccaattaagacaattggattagcaggttgtggtatctcagattggagtatttgggaattagcattacattgtggatcaacattagagagattaagtattaattattgttggaaattaactgatgttggaatttgtaaagttattaaggcaaaattaattgaaaaattatctgttttagagatacgtggaattcaaatcaataatattgaagatttagttaattggagaattcgtaaattaaatgaagaaaattttaaagttttaattgaagcttgtgaaaagattgatttaatgattaatgaatttgaatcgaaaattaattatgaaaataatttaaaactaatgaatgatttaacaaattggattaataataatgaaaatgataatgatattaattttagaagttttttaaataatcgttatatagaatagaatggtatgtaagtatatacataatgtaaataaatcaaatcaaaaaaaaaaattatgcttcacaataagctctataaagaactaatgattcattagtttcaatatttaattcaacatttggagcaacaaagaaaactgcaccagtgaaaacatcaagtttattttcatcattattactaatagtaccattaccttcagttacaattataattgaaggaccattaatacctttacaattagccttaccctttttatcgaatttaacttgtaaaactgaaaattcatcaattggtggatcatataaattgaaaaattgcatcaccattacctctttcaaaatttgctggatttaatttttgttcatcaacattatttgttgaataagttaaactattaattaaagtttcaacatctttaaattttggtgtaaaacctgatctaataacattatcagaagctgccatacattcaattatatcacctgaaatataagcatgaggttcacaagcttgtaaaaacattgcttcacctgtttttaatatacaatgattaagcattaaacaaccacaaaataatccaatatcatttgggaattgatcattcaaacgtaagataagatcagataatgtttcaccatataatgatggattttccttagcttttgaaactaatgaatttgaatatttaattaaatcatcatcatttgaatacataacttttgagaaaactaatttaagattttcctttgaaggattgttaataaatatttgagttgtttcatcaccaataagtgatgagaattcttttatattaagaagatgatctttaattgtttcaagaggtttaaatccacaaaaggcttcaaaatcagtaattgcaattgccatttcaggtttatgattatcatcaggataatgttctggatcttttaaacgtaattgttcagctaattttttatcaggatgagattgaattgataaaactttttcaattgataaaactttgaaaaggaaaggtaaagaattttttaaattaaatttttccataattgattttgataaatatttttcaggatttgaagctaattaaatcagataatttttcaccattagttgataaaatagttggaactttagggtgagtacccatccaatattctgcatagggtaaagattcatcaataattacattttgaggatcacttgcatgagcaaatctagcaactgaagaatttgaacctaatttaccccaagcataattttgaggaccaccaataactctaaccaaatcgtttgacattgtataataaacagaggggggtatatagtttagtatatatgataataaagaagatacaaaagagaaagaatttagaaaagaacaggtaattgtaaacagattgaaaatatattcatcagttaccagacacggaacaacctcatccttatatagtaaataagaaaacgcgcttttctcctcataatgaaattataatgaaattggcaacggtgaatgtggtcttttcaatattcggtctgttatcctaattagtgaagtagtaggtgtaggtgtaggtataagtgtagcaggtaggtttatgatggtacagtggactgggttcagtgttctcagtgggtagatcgtatatcttactgtaatctggtgtattagtagtgttattatcagatactttattattattattataagacactaaactaaccattgaaactggtggtgttggtggtacttgtatatttggagaattagatcttaattcaaatattggatcctttaatctatcattataagttggtggtatatcctttaatgaagtaattggtatttcaatttcatctgatggttcaattatatttaaatattccatcattgaaaagaaatgaatcaggatttaattcatcacatgaagaaacaattaattctgattgtgactgtgactgtataattgatggtaatttatcaaacattggagttaaattatttgagaaatttgtttctcctatttgaaataattggtttattatataataatggtaaatttggatcaatgaaaaaatttattggtaatttactcttaatttgtgaaatatgaccatcaggatttaaaaattcaatgaaaattataagtctatgtttaacattaattaatttattattaatatcatgaggtaatttccttaaattatttggtaatggtatattagcctttaatgcccagaaatcatttggtaaataattattattaacatatggtaaatttgattggaaaataattttctcatcagtgaaagttgattcaccaaaattattattattaaaagtattaaatttaatcagttgagcaatttgaatagttatctttcccaatttaatatttttcaataatggttgtaagagaaaataaattttcaaatttgaatttaaaggtatgtaagttgaaggtaatctaattttataattaattttattaatccaagaattttcagctaaatattcaattacaatgagatgataataataactgtgatggtttcttaataatgattaaatgtttaaaagaagtacttatacttatactatctatcactaaacactatcttactctgtaaagaatgaacaatactagcatatttgagacactcaactgattctaataattcatcaaatgaaacactgatggtaaatcttattgaatgattacctcttttgtataataataaagtgggggtgttattactattaactttaaagagggggtgcgatttataactattaagtagtgtactctctttaaatggacattcacatatcatcataccgtctttcgtctggaaggtttcaatatagttaatattataatgagtatttaaccttatatcaatatctttaataagtgtatcttcattaagagagaatacaatatctccacttattaaaattttattatcatcatgaatattattatcagtgtctataattatggtatttctaattctactatctattcgtatatcatgtaacatttgtctatagtctataatatatagtctattatcatacactaatatacggggtaaagtaaagtatttaaataaataaaataaaatatagaacaacctaataaacctaataaaccctttaacaataagaaaagtgaaaaaaaaagaaattttccgattggcgctataaactattattataactacaataacaacggtcttctttcattatcttcaatgtcttccgtacttcccctatttgctgattcatctattgattctattgattcaattttattaagcctcttaattattattatagcccctcctcctaacaatgtaattaaacttaaaattaaaaatccatatctttgtaatcctctttcatacattattgcataaattatacctaaaattccacctccaattgcaggtgcacaaagaaataacccccatgcagatccaaatatttcaaccccccaaatatttgatactaatgttgggaataatgtgaaaactgatccatatgaactacccattaatattgttataattgtaattaatcctgtttatcactacattattatcattattatatcctttaaataataaataatatccaaaacttgtaattattgatgtaattaaaattaatctaattgatgttattatactattaccaataaaatcatttaaaaatcctattaaaaatctaggcaattgtactagaaattgaaaaaattgaaactaattcagttaattcactacctggattagaaattgttgataaatttgcaataaataattctaatggtccacttaaaaataataatgaaattaaaacaattggcattgaataacttttcaaaaatttcttaaattttaatttatgttcttcattaatattaatattatcatttattgcatcattctcttcttcttcaattatttggcaaatataatttctttctcaattgtaacaacaaaactactcatccaattaataattgtaacaattaaataaatccattgtaaaaattcaaaaaatttacttaattcaaaactactttcatcaccaatactattttcaaataaacttaatgaactaatccatgaaagtaaaaatgcactaactccataacatgcaactggtaatgaaatacttatactcttatttggataaatttttgcacatgttaataaactactaaaatatgaacttgatgtacccataccaattaaaaaaaatgcaaaactcataattaaaacattattatctaaatttttaaattgatattctgcaatccaatatcctggtataattaaactaccaataattgctaaaaatactgatccatgtgcatctccacaataacctaaaattggtaatgttaaatataatccaatcatcattgaacttgcaattaaattattttcaaatgctgttaatcctaatcttattagtaaatgataatgcaaataatgggaataatgaaactgatccatctaataaacatgttattaatgacattgcaaatgatactttacgtaacttttcattatcaatattatctttaagataacctcttacatatcctgtaagtactctctctacccttgacagagtcattgtatggtatatatattatattattatataaaaaacctcctactctatacaacttgcataaaagacttccttgcttgttcacgtaatgaaatttcaactttttcattttcatttccaattttaattctcccgtgtttgaaacactttgactgctctgttatgggtgtatgctctctcctctctgcatgctgtgttgttatggaaacttatcactgttatcacttagtgtattgttacctacttgtatcttaaatgatccaatatcagtcttatcggaagatttcactctataaccctcttcaacttcatgtaatagttgctccgtcgtatgattattatacattgattgttcaactgtagtcattataaatcctctcttatcatgtattaatggattggttccaaatattccatttaaattcaatctatttaatgaattaaatgcaggtgcaaatgtaattgtttcatcattaactctaacacaaatactattattattctcataattaacatcagtttcattattaataaaacaatatcttgaatcaagtaaatcaagtactttattattttgattattaccactattttgaaaccaatttttagttattaattcaataaataaatttgttaatttattattaattaaatcatttttattaatacttgtaattaatactggattttcaaaattaattggttcattataatataaaatacctttattaccttcaattaaaaaattttctaaactaatacttgatattttcaatttttgtaaatattgaaactggtataattaaattataatcatcaattttataattacccttaatatcaaatggtattttaccatctttactattcatattaatattaattggtttttcaatattaaataaaaacattgatttacaattacttggtaggaatattgattcaatagtattatcattttgattattactattcggtaatttaaatgtactacctttaataccaagtttttgaatcaaattatcacttataattgatgatgttaaaaccaatccagtactttgatcattgatataattatctgtaaaactaccaaatgtatccttatatttacttaaactactaattttacgattgttatctactaaatggttattattatcaataccaataatattactactaatactactgctgctatcctttgagaatatttcattattatttggtactttattattagataataatgatgaaactcccttaggtataattgcagacattgacattgttatatacaatgttattataagcaaataccacataatatactctgttaatatactatgatattgtccaaagaagaagaagaagaagaagaagaacatgcctaataaacaccaataaacagccctaccttaataaaatcctcttaattttaaaatgctcagcgaagtggacatccttcaatgcctacaatacacctcttttctttcttctaggggtttaatctttacttgaacaatgtcaattgtacgtaaccttacgtcccattggattaacatccattagatcaactagatctttctccaaaatttcacctttatttaataaagttgaagattttacacattttggttacaaaacagttccaaaggaagaaaaggaaaaattagttcatgatgttttctcaagtgttgcatcaaattatgatgttatgaatgatgttatgtcaatgggtattcatagattatggaaaaaacatttaattgaaaaattagattgtggtatgagaccaaattctaatgaaccattacatttcttagatgttgcaggtggtacaggtgatattgcatttggtttattagatcatgcacgtttaaaatatggtgataatttatcaacaatgacagttgcagatattaatcctgatatgttaaaagaaggtgaaaaaagatgtttgaaaactccttatgcaaattctccaagaattgaatttttagaacaaaatggtgaaaccatggataaaattccagataattcaaaagatgtttatacaattgcttttggtattagaaattttacaaatattcaagctggtttaaatactgcttatagagttttaaaacctggaggaattttcgcttgtcttgaatttagtcaagttgaagatcctgcattagattatatttatcaaatttattcattctctttattaccaattatgggtcaattaattgcaaatgatagagaaagttatcaatatttagttgaaagtattagaaaattcccaaatcaagaaacttttgcaaatatgattagaaaagcaggtttttacgttcctggtaaaggttatgaaaatttaacatttggtgttgctgcaattcatattggtgttaagatttaaatgattaattaatataaataactaactgactgtctatagatttaataacataacatactataagtaaattcttagatttcgcactataaaaggagagtgatttcccgcattttctaactttctatacttcttcttgatctttctcttcttttaacatccttatgctagggcattacgtgtatcagtgaggattcgtccgagatcatgtgtttgctagttgaaaacttcaacatgactgcttccttatattttgaatatttggagaatttttcaatttattatttatttcgataattgtttaattactatgtccttgacaagtaatttaatagtgtcttttttgtaattacattgtaatgtatcgtaatgtattgtgcgatgttaccaatcttcaactgtaagatctgatttaagtatatatgatgtctttcttcatactatatcgtaataaagacataatagaaataattagatggaaaatatttttctttaatttcccattcatgatgtttctttcaaccaacaaatgttcaaaaaattctctaaagacgacgttcatacacgtactaatgttaaatcatcagttgctaaaactcttaagagtaaattagtttcacaatatccaaaattagaggatgtaattgatgaaattataccaaaaaaagtaccaatttcactttataaatgtgaagataaaattcaactttatgttgttaataatgaaattttattttatcaacaatttgatgatttaatacctgaattaagacttgttcataaatatcctgatgcattcccaagtgttcaagttgatagaggtgcaattaaatttgttttatcaggtgcaaatattatgtgtcctggtttaacttctcctggtgctaaattacctgaagaggattggccagttaataaaatcgttgttgtttatgctgaaggtaaagaaaatgcaatggcagttggtaaattagcaatgtcaataaatgatattaaaacaattaataaagatacaggtattgaattatatgaatatttaaatgatggtatgtggaattttagagattaatttgttaattaattaattagttaattaagttaaatagttctttacttatatataaaatttttataaatagtttataattgatttgtggatttcaaactttgacttgatccattaccaagtttaaaaataggattgaatttacttttactattatgattatgattattattatgatggtataaagtaggatctctaaatgatgaaaatgtaaatgaatgttttaacccttcaaattgtaaatcaaatggtgaatttggtgaacttgaaacttctgattgtttatccattggtggtggtattactggtgataaattttgtaattcatgtaaattcattgttgatctagttcttaatccatcaatattaaaattatcaatacttttctgatgtgataaacttctaccttcctctaatccatacatatcttcaacggattcagttttattattttgaatctttcttaacattttctttaaccctccaaatttttttaatataatataataaataccaccacaaagtaataaaaaaataataaatgataaaaatgatgatgaaactgaattagaattattaattgatgatggatcactaattatttgatcatttgatgatttagaattatctattgcagaacctggatatattccaacacttccatcatcatttatttgacttgatgcatataaaaccattttacctaatgtccaagatagttcattaccgttaatattattaacacttctgaaaactggctcatcactttcctttaatttagaatcatcatcaatacccagtcttggtatatcaaaaccttcatgtaatatattaacaatccaacttgccttaaaacatgaagttcttaataattctaatgttaaattttcaccgtattctttattattaaatctattcattataatatcccaatctgtattacaaaattcctttgttgctttctcaaaatcattataattatagtcaccagttaatttgaagacatcgtttgcagtataccaatattcactaacaccaacaaatttttccagtgcaaaattcattgaaggtgcatgaactccattaaataagcaaggttcatcagaacaaggtaaatttttcaataacaaaggataaattgtctttaaacaattttcataattaccagaaccagttatagtaaaaacactttctccattattatattcgacatcagttttcataccaacaggtgaacaaggatccattaaatctgctttaccatcaccatctttatcataattaacatttttaggtaatgcattaactaaactttctaattgtctaactctagcttcatttgcaccaaatcctaaccaacttgaaacgaaaactgaccaatcaaataattcaccattgtttttacgtaatttaacagtatataaatcatctaaatgtttggttaattgatcattagagcttggaacaaatgcaagttgtgttgatgctccacccatatccatgaatccatatgggtgtatataggatttattattttcatcatcattaccattattaatagttaatctattggttaagtaatttaacgctaaccaaccatataaaccttcaacatcaccatcaataacttcaacatgttcatcacaagggtatatttgaaaatctgtctccttatggaaaacattacaagtttcttttaatattctatctcgttcaatcgttggtaataatctcataccagcagttgcttgaatgaaaactggtgtttcctttcgattactctttggtataattttctttatctcatcataaatgtcttcaaaataatcatcccaaatatcttttccatacattttaccttgattattaaatgttgataatcctggtttaatctttttataaccaatttgtgtaattgttggtaacccatttggatttaattgtttatctgatgaaaattgatacactaatgcacgtgagccagatgatcctgcatctatcactatagcgtattttgatgacattcgttttgtgaataataaaaggaccttacaacaaagtgataagattaacttaaacagattgaactgtgtagacaccggcctatacacttcccaatgatggtaatcatgatatttcaattttttattatgtgaagtcttttttcactgcatgaaattttttttaaacatgaaatttttttttcactttttattttttaatctttgatttgattaagaaactttatcaacttgttttttaattaaacaactaaaccacaatgagagtcaagaagccaacatccaagcgtatgactacccgtttaagggaaggtattaaaaagaaagcagcagctcaagcacgtaaagataaaaaatctgcaaagaaagatgttacatggaaatcacgtagaagtaaggatccaggaattccagcatcattcccatataaggataagatcattgaagaaatagagatgagaaagcaagaaagagaagatcaaaaacgtagaatgaaggaagagagaaaggcagcattaagaatgaatgataatatcaatgatgaagatgctgatatgattatcgatgatgaaaatgcagatgatgatggatcaaatgatatggcagcattattagaaagtgcagaaaatgcagcaagagatttcaatggtgaagttacagttgatagagaaggtgatgatggtatgggagaatatgaagttattgaacatcaaattgaaaatgatgatgatgatgatgaatctgaaaacaatagtgaaattgaaaaatctagaaaacaatttgataaaatttttaagaatgttgttgatacagctgatgttgttttatacgttttagatgctcgtgatcctgaaaatactagatcaagaaagattgaagaaacaattttacaatcacaaggtaaaagattaattttattattaaataaagttgatttagttccagatgaagttgttaaacaatggcttgattttcttggatcatcattcccaacaattccaattaagggatcaaatggttcaaatggtggtaaaagttttaataaaaaattaacacaaaatgcaactggtaatcaattattattagcattaaaggcatatgcacaaaaaagtaatttacatagagcaattactgttggagttattggatatccaaatgttggtaaatcttcaattattaattcattaacattacaacatagtggtaaaggtagtaataataagaattctggaccatgtccaattggtaatcaagcaggtataactaagacattaagagagattaagattgataataaattaaaaattattgattcaccaggtattgttttcccagagaattatgatagtaaaagtcataaaaaattaaataagaaagaatatgaagcaaaattagcaattttaagtgcaattcctgataaacaaattgaagatccaattaatgcagttaaatatttacttaataaattatctaaagataattcaatggcagatagtttcaaagaattttattcattacctgcaattggatcaagtgatttaaatgatttactaaaaaagttttaattttcattgcaagaaagcaaggtagattaggtaaaggtggtataccaaatttacatgcagcagcaagtattgttttaaaagattggagagatggtaaatttcaaggatggagtttaccaaaatctagtaaaagtgaagatcaaaataatagtaaaatacctaatggagcaagtggtaagaaagcacctgaaaaggttgaacaaactacaattgttaaagaatgggctaaagaatttgatttagatagtcttttcactgatgtatttggtaattaattaattaattatataataacttgtgtaatagaaatattcgttaatttaaagtatgttttatagtaattgttcaaagatataaagatattatactaaactaaataaattaagctaatttatcaatagtttgtttgatagcacctggatttgcaccaataactttaccaactacttcaccatttttgaaaaataatatagttggcatagatgaaacatcatttgattgtgcaacagttggtaattgatcgacatcaactttatagaaagaaacatttgaataatcatttgagaatttttcaagcattggagcaatcattttacaaggaccacaccaaactgcgaagaaatctacaactactaaattagcagcagaaattgcagttttaaattcagcttcagattgaataacttggaccatttttgtattattagtatttattgaatgaggtttatttgagtaaggtttaacagtagcctttttagttaaaaatttattcaagaggacaactaaacaaactaagagaagaaagtttaacattaattgattagaaggaaatagatgaaggtatttatggaaaggcaaaatatgaaaaatggtgagaattactcagcactgtgtagaatctcgattttaatttttatattgcatggttttttgatttgtaattggtataacaactgactgtggcaaattacatgttttcttttctttctttcttttatgttctttctgcttcctcttatatacttatattattaatcaataagagagtatattctaattgaaccatcactgtattagtaagtaattgaatagttcagttgatagatattataataattataattatacttaaattaaaatagtagttaataataataataataataataataataataataatataaagtaaaagtagttatcattgattgatatagaccatagactatagagtatagagtatagatactgttaatactgttattacaagatactcttatataagatactcatacaatactcttataataaaaagctgagcccactaactaactaagaaaaaccctcgcaatattcaaataaataaggaaaataaagaaattattgttaaatttccgaatataaccgtcgttcccccaatttcccatttgttcccgcaaattgactaaaaaattgactaaaatttttactgcaacagttttcatcttcattttcattttcaacttagaggtgactaacttgttttgtcttttaaatttactcccttcatattggcaaaattattatatcacaaaccgatattaccttatttttgcattagcatttattcttttattcagtgattcattcatattactagtctttctctaatttatcaccattcccttcaatcacaccactcatcctcaaactactattattaattaataatactatattatcaaaatataataaaggaaaattttgtattcactaggttaataataacaagaagaagaagaataataataacaataataacacattaaaagaaacaatattaataataataataataataataataataataataataataacaataagtaactttcattagtaattaataacttataactaataactaataattagtataataagttttaccaaatgtcatttctatcaggttttctctgttgttttgattctggagattcatcgaaaaaggaaattcattcaaataataataattcaagtaataataaattaaattcaaccaaatcaactcctgcaagtttaaattcaaagaaaagtttaaattcttattcgaattcaaatactagtttaaatcaattgaatcgtccaaaattatctaaaactcaatcaaatttacaaaaggctttaactaattcaacaacaaatattaagactaataataatactaattctacacctgttgatagtattcgaaaagaaaaatatcaataataataacaataataatatatcattatctaaatcaactgctgcactttcattacaagcaccaactcctttaccatcaaatacaaatttaaaaaatttatcagaaactggtaataattcaacttcctcttcaacttcaaaattacctgatcaatcaaaatcaacagaatatactaaaatgattgaagaaatatcagaaactaaagattcatcaaatagttctaaaaatgatgatgatataattcaagttcatgaaaatcaaactcaaaatactgatgatttagataatagtaatagtaataagtaataataataatgatgataacaataataacaacactaacaacaacacagctaacaactttatttctaccaataatgataatcataatgataataccaatgataattctaatccaatttcaaatattgatcctcatgataataataatataacaaatacattaaattttgaagagaatttatatgatgaacaatttggattagatttaacaaaaatattacctgatcaagcagtttcaaaatctggttggttattagatgaaaaacctgcatatttaaaaaataaaaaatgtttagttttagatttagatgaaacattagttcattcatcatttaaatttgttagacaatgtgattttgttataccagttgaaatagaaaatcaaattcataatgtttatgttattaaaagacctggagttgatcaatttttgaaaagagttggacaattatttgaagttgttgtatttactgcatcagttgcaagatatggtgatccattattagatattttagattcacataaatcaattcatcaaagattatttagagattcatgttataattatcaaggtaattatattaaaaatttatcacaaatgggtagaccattagaagatttaattataattgataattcacctgcaagttatgttttcatcctcaacatgctgtaccaatttcaagttggtttagtgattcacatgattgtgaattaactgatttactaccatttttagaagatttagcatcaagtaatgttgatgatgttagattagtacttgatattaatatttaatttagtatcgaatatctaatacctttactaaaacaaaacccttaatgctggtcattatcggatgtatttctacaaaactattcctacaacttataaattaattaattaactaatattaatattaatataatataaataaaacttatataattcaaactcaagttctaatatagtagtaatacttaaatacttacttaaatacctacatgtctgcgtcggatgcgtcgctgtgtattctgccattaaatttaaagtgcgcgcagtttctcaaattgcccttccttcaactatccgatgtaaatttaattagccactggaagaagaaatgtagtgaattaatatgatgaatgttgtacgttatttaatcaacggttttattatattcgtaaatagataaagaaataaaatatactagattaatatttttactagaataaaccacttttaaaatattcaatataaattacgacataatacgacacatacaacatttatatatcacaaatataatatagcaaattaatataattaatataatataatgagtacagataattggaaagataaccttaatttaccagtaaaggatttacgtcctcaaactgatgatgttcttggtgaagaaggtgttacatttgaaaattttgatttaaagagagaattattaatgggattatttgaagcaggatttgagaaagccttcaccaattcaacaagaggcaattccagttgcattaaaaggtatggatcttttagctagagctaaaaatggtacaggtaaaactggtgcatttgttataccaacattgaataagataaaaccaaaagttgataaaattcaagcattgattttagttccaacaagagaattagcattacaaacttctcatgttgttaaaacattttcaagacatatgggaatacaagttatggttacaacaggtggtacatcattaaaggatgatatagttagattatatgatccagttcatgttttagtcggttcacctggtagagttttagatttagcatcaagaaatgttgcaaaattagatggttgtgaaatgtttgtaatggatgaagctgataaattattatcacaagaatttcaaaatattgttgaacaaattttaaaatttttaccaaaaggtaatagtattagtggtaaaaaaaatggttatcaaacattattatttagtgcaacattcccaagaactgttcaaacttttatgaataatcatttagatagaccttatgaaattaatttaatggatgatttaacattaaaaggtataacgcaatattatgcatttgttgaagaaagtcaaaaattacattgtttaaatacattattttcaaaattacaaattaatcaagcaattatattttgtaattcagctaaaagagttgaattattagctaaaaaaattgcagaattagattattcatgttattattcacattctagaatgaaacaaagtgaaagaaataaagtcttccatgaatttagacaaggtagagttagaaatttagtttgtacagatttattaacaagaggtattgatattcaagcagttaatgttgttattaattttgatttcccgaaaaatgctgaaacttatttacatagaattggtagatcaggtagatttggtcattatggtttagcaattaatttaattaattgggatgatagatttaatttatatcaaattgaacaagaattaggtacagagattaaaccaattccatcacaaattgattcatcattatatgttgttgaagaaccatcagctgtaccaaaaccttttaaaacaaatgttagtcatcatcaacaataatttgttttattcatattatatctttactcgaattaactaatattcattttaatcaattaatcaatttatcaatttatcaatcatataactttaatatgtatttacatcatttttttttctccttattataattctatttcctttttttattactttttcttcataatgtttgagttcaattcattaattattaaatgatcaacattatgaccattctctcctgataattaagtttgttaatttagttttttctataaatcttgtttgtataagacttctattttatagttttttacaattaataaatttgattacttcatcaagacttattatgacatgattattgtcgtgtattggaaggttcaactgtaattgcttgtgttttgttggtatatactaatatgttattacatgaatttaaagccctaatgttgtagtatctgttactgatactctattgatgcaaaactaacaaaaaatgaatgttatttaataaccaaaaaattttaattaaaaatgtttttgaaaaattaaaaatatttgaaaagtataaaaaattgataaaaacaatgacaaaaaaaatacgataatatgaacgtaataacatattataaatataagacaatacaaattcacaactaaattaaaagtatacagaaattacttcattatagaacaatatacttatagtcaatttttcttacctttcttctttgaagcagattttataataacaaatccaataaatgaagtaactaaacaaacaccaactataagagcaacaacaggtaatgcaattgcataatatcttggtaaaaagaaatattgtaaaatattatcatctgcaataaatggagttacgaatgtccaaattgtataatatacgaaaataaatgttgctaataacaacattattaaacctacttgttgatcttcctatacagaattgttagtatatttatttctctgggtaaattatattatattatacataccattattgttattgccaatcaggaataaacagagatgtcgttaatatacattgcaagttagaattacgtgttaaatattacctaatactataagatgaaaatataaatttaaatctaaataacacttcacccaatgagggattggataatttcgctgattactctttcctttccttttaattccatttgtttaactgttttcttctttgaactttaacttattatagggtaaagatgatgtccgcaattagaactaacgttttcaaattaaacaattcagttattagaacttcaattagaaataaggttactttacctgaattaaaatataaatttactgatttagaacctttcatttcagctgatttaaatactttacattatacaaaacatcatcaaacttatgttaatggtattaatgatgcattagaacaacatgcagctgcaaaagctgcaggtgatttaaagaaatgtgttgatttacaacaaaatattaaattccatggtggtggttatcaaaatcattgtctttattgggaaagtttagctccacaatctcaaggtggtggtaaattaccaaatgaaaattctgctttctataaggcagttattaatcaatatggttcatttgagaaattaattaaaattgcaaatactcaattagctggtgttcaaggttcaggttgggttttcatttgtaaaaatactaataatggtgcagttgaagttgttcaaagatataatcatgaaactgcttctggtcatttaaaacctttattagctttagatgcttgggaacatgcttattatttacaatataaaaatgttaaagttgaattcttttcagcaatttggaatgttattaactgggaatttgctgcaaagaaattcgatgcttaaatcttattggtttattgaaaattttattctatttaactttatttaacgaaattttataattatagttatttataattaactattattattattattattattcataaatacacatcatcatatacacacataaatttataaaacagctccaaatccaaatgttatcttaattgctctgaaatatttatccttaaaattattttcaactaattcttcttcaccaattggaactccattcatattaacattcattatagtttcactattaccttgatctaatgttattaaaattttaacataatgaccttctttccaactactaattctccatagcatttcaatttctttattttcaattaatttagttattttaccttcaattccacctccgaataacttaaattctgctccaactcttggttcaataccaattggtgcacttcttgtccacattgcaactctttcagggtttaataaagtaatatataattgttcagctgtagtattaaattctgtactaagatttaattttgcaatattatatttttgtgcatatgcaggtaatggagttgatgatttattagtttctgctgctttactggatgatgattcactcttattaaatgttgtcttctctttaataactggtttcatataatttaaattttgattacccttagtaaaagttgacataacttgagaatcatcaacttgaatatcagatccatgaacattaattaatgttggaccaaaatcttctaaaatttttctaatttctttaattaatttacttctaattaataatcttgatttttcatcaattctatcatctaaattaaattgatattcatcaggttcggtatcatacataatttcaggaattgtaattgtacccttatgaccagttgatgattcataattaatagttaatgacatatcataaagagagataactttacccttacgttgacaaacttcacaatcacctgttaatgattcgactgatgttaaacttacagttgtatcattattttcatcattcactgataaattctttaatttttcatcaaaatatgcacgagcccaatcaatacaattcttatcaacccaatgccaattattaggattttgaacaaccattttaagttactttatctaagatctacacttgtagaaaagaagatagaaggatggaaagctgcattaacatgaaaatttaagggcggctggttaaaatattcaaacttaacttggtcgctggaagtttctagaaagaagtttttatacatgtttaaggaatactttacttatacattacatacaactatttaaatggtacagtcatattaatatgaacagctttattttcagtaaataaatctaaggcataactacctaattctctaccaataccactcattttagaaccaccaaatggctacatgaatatcggaatcaccatttgaattgatgaaaaccataccagcctctaattttgatgcaactttatgagcttttgtaatattatttgaaaataatgcagctgctaaaccataagttgtatcattagccctttcaataacttcttcaacattattaaatttagtaattgcaacaacaggtccgaaaatttcttctttcataattctcatttcatccttacagtcaatgaaaatgaaaggtttacagaaataacctggaccatctaaaaattctccactaattaattttgcaccttcattttgaccaatttcaacataacttttaactttatcatattgtaatttagatactaatggaccaattgtacatttttcattaaaaggttcactaacaattgcagtttcatttgttaaatttttaaatttttcaataaatttatcataaattgaatcttgaatgaaaaatcttgaagttgaagtacaaacttcacctttattatagaaaataccaccaaatgcccattcaacagctaaatctaaatcacaatcatcgaaaactataaatggtgatttaccaccacattctaatgtaacttttttcaaatttgatgaaccagcactttccataattttttgacctgttgcagttgaaccagtaaatgcaattttagataattttggatgattaaccattgatgaaccaacatctttaccaaaacctgaaacaatatttaaaacaccttttggtaaacctgcctctaatgcaattttaccataccataaagcagataatggagttatttcacttgatttcataacaacagtacaaccagttgctaaagcaggagcaattttccatgccatcatcataaatgggaaattccaaggaacaataccaccaattgcacctaatggaattggttcaacataacaaattttatttttacctaaaacttgagaaccaattaattgaccagtttttttatcagaccaacctgcataatatttgaaaacttcataactttcaactaaatcaccattaagacattcattatgataaggtttaccattatcaattgattcaattgaagcaatttttgatgcatctcttttaataatttcatatattttatataaaatttcaccacgttcagaacctgttaaatcagaccattcagatgatttaaaggcatcatttgcagctttaacagctaaatcaacatgagattcatcggcttgataaattgaacaaattacttcttcagttgatggattaattgtttcaaaagttttatcagttttaacccattcattattaataaataaacctaaaggttgttcaagatcttcaccaagtggtgtagtaatagtagtaaataaatcagacattgtcatctgaaagaagtaaatattatttataaatagtattcaatttaaatcatggaaataaacgttatcttttatactctacacccttgaatttatactctcttatcttttatactctacacccttgaatttatactctcttatcttttatactctacacccttgaatttatactctccaagataagtaaatggatccggtcccttatcttatcaccgctaagaatctcgcctctaactgcctaatacggtcagttaagcggtatagtatattacgtaataattacataagcagtgattacgtaacaacatgaattttctaaaaatttgattttgattttgaaaccatcttgatgttgatgatgttgatgatgatgttgatgatcaattagtacttttctacactcttatatactcttttatcggtaaatacagataaataacagcttatatacaattatgtcatcaaaggtacccacaaagatcaaaactttagatgaatcaaaggtaattgaacgaaagaaaccaataatatctgaaactataattgatacagattctcaaagatattatattttagccctatttatcttaattcaagcttggaaattatatgatctatatattatacatgcctatgatactctgaatacttcaaataatgaaataattccattcttcatatttatttggtttcttaaatccaaaaatttcattcattttcaaatatggtttctttgatagtttgttaatcttaataataccatttcttaatatacctaaattaacattcactcctttattaagtataatattattatgttcaatcaattttttaacaatattattaacttgtaatttctcatttactttaacttcaattttcatttcattatatcgtgttttagtacctgaaaaggaattatcaattatggaaaaatatgttaatactgattcaattattaatcaatcggatcacttcaaggggaaaaaaatcattagatatgctccagattcttcaattaaaattaatcctttcagtcaacaattttgtattaatccaatttatggtgaaaaaattaaaataccaataagagttgattcaacttatgatttacaatttttacaattaaaatatttagattttagtaattctgaaactttatacaacttcactcaaaaagatttaagaaaatatgtcgtttcagattactataattctccttacataaaatttgatccatctgttttagctgataataatgttaaaataattgaattaccagcagataatcccggttattactcaattaaaatggcaactgataaaaaggataaagttatacgttcatatagatcagatactataatacctctttgtcctgaagcttcattcattgttgaaaattccttcgtttcagataaatgtattgatgattcaattgatgatttgaaaatatctcttattggtgtccctccttttactttatattatgaagaagaaatcaatggtaaactatctaaattgcctcaaacaatcattgaaaatccattagatattaattcaccactaaattcaaatgataagaaaaataacaagaaaattaattatccttcagaatttttaagtgatttaagttgggccaaaagtcaacaacttacaacttcaatctcaagaaagaaattacaaaaatcaggtaaatatatttacactattgatagaattgttgatggatttggtaatgtgatcaaatactctccagatcctcataataatgcctcatttgtctcatttgacactcatccagttccattacttaatcttgttgatactaatcaaaataaaccaattctcactagtgaagataaatatttgaatattgatatatcaaaagttgaatcatctcaattaagtaatgaaggcccatttgattttgtttttcaatatactaatgaaaattcatcagttgttgaaacatttaaccaatcatttgatttttcaaaagattcaaaatctaaaattaaagcattaaatccaggtaactataaaattttacaaggtaaaactaagtattgtccttgtaaaattggttcatcatcacttaacgttttatctgctaaaattccagaaatggaaataatttagaaccaattgttgataattgtgttggtactataggatttaaatttaattttgattttgttggtagtcctccatttgaaatttcttataaaattgctaaacttgaccctaaaaattcaacacacgttttgaaggttgaaaagtatagttcactcaaatctgattcaactaccttagaatatgatttccaaccagctaatgaaggttcttattttattgaatttacaagtttgaatgataattattataaaaatcaagtgaaatttgatcaagaggaatataggtatattacttattttaaacaaaaaccaaaggcattcttcaataaaagagataaagttcaacgtttatcaagttgttttggtgagtctaagaatataactctttcctttgaaggtaaagctccatttaatgttacttataatattatttctcctgatttttcaactgaaactttcactctgaataatattatcgaagataaaatttatattcaaactcctgaattattaagaggtggtgaatatatcagttagtttgaaaaatgtgtccgattcaagtgattgtgatgttgatttcaaaggtcaagaagttcatattgatgttaaaaatgatatgcaagaattaagtttccaacaagaagaaatttttgaaattgttcagggttcaaatgttgttattccattaaaatcacaatctaatgaattaattgatttaatttattcctacactcctattgattcaactgattctactaatgttactcttaaaaaaattaatccatcagatggtatatctgttggaaaatctggtacttataaacttatttcctttaaacaaggtaattgtagaggtaacatctcaaatgactatacagttcaaataagacatagcccattacctactattcaaattgcatcaaatcaatcattattagtaaatgaatcttattttgttaaacaaaatatttgtccaaaatcaaaatgattatattacagtagaggtatcaggtgttacaccttttattattcaagtatgaaatagaacatccaaatggtagaattgaaaaacttgttgaacaaattaataacaataaacttaatattgacctaaattcagaatcagcaggtgaatacacttatacaataaccggagtttttgattctgtttacactgaagaagtaatcacagatttgaagggatcaaaatcatatgaatttgacaatataattttcaaaaataccgttacaagtttaccaagtggtagatttttggaaaatcatgaaaaaattcaatcttgtgtatcaatactgaatgatatcacgaaattaaccccaattaatgttgaactcgaaggtttaagacctttatctctatacgtcaatatttatcatgaacttaatggagagcttgaaaatgttgcatttgaaaacattgacacttcgttagtcgatcttttaagtatctacgattttctcagtattggatcacatacaattacaattaacaaagttgtagatgcaaatggttgtgtttcagatgaatctaaattattagaccaatcaataactattcatattagtgatgttccaaagataagacacttgattgaagaatctaatcaattatctgattttgattctgaatctaatagtaattactattgtgttggagatcaaattacttatatgcttaatggtgcacctccattttcaattgactatggatttaatgatgaaattcaacatgttgaagtacaaggaaattatttcaaacgtagagcattgaaaccaggtcaatttaatattaaagcactatctgactcagtatcgaaagaatgtatggttgattactcattgatgaataggaatgatctaaaggctgtaatttatgacttaccttctgtggagattgttcaaggtgatagtattgaagaggatattcatgaaggtgaacaagttgaaatcaaattcttattaactggtacaccaccatttaaattgacttatattcgtaaagaacttgatgattcatctaaaattgtggaaactgagatagctgatgaaattatggcaaatgaatatagaataatggcaaatcttgaaggtacttatgaagctatagaaatccaagataagtattgtattgcaagaaaccatggattttaattgtgtaagtgaactatgtacaaatactgtagatttttagattttatttgaattattagataattagcgatctattgtgatagatacatgtattatacaattagcaaaaagtttagtgtattatttcaattgataaagattgaattcgtttaatactggtcgatcgttttctatacgataatcaacttggttatacaatgataatactccattgattatattctctgatggtatttttgaagaggccacccaaacttcatcatccaaaagtaattgttttcgatcaattttgtttatcgtgtaatcaatttcagcagtaacaatagtgttaaataatttctgtgataaatctgtgactctagataacctaaccttattcacctttggtttcattttcttggtttgtttttcatcaacacaataagttccaaatgatgatattttcatttgttttttagtatccgaatttttatcattagacttttgttgcaatggcaatagtttggcagctttaggaagctctttgctcttaactatatgaggctcataggcatcatctgataaatcacctacaaataaagtttcctcgtttgatctgtggatttcattggataacttggcagtggtccacggatttgcaattgatatatgtgacgggtttatattttcaatattttgtgagttatgtgaagattcttgaggaatatccatttctgatgatatacctgttgtatcatatatagttctagaccaattattagcatcttcttcttgatcgtgttgttccctttcagtgttggtatattcatttgtttctctagttagtgatgttttttcgttattataattatcgtaacttttattgctcttttgagattcagggtctgatgttacttcaatattaagcatttgacttatttcaggagtttcttgcactaaagtttgacagtcggaagtaacttctagatccatcaaaggtcccggacttgaattatttcgatacgtttgagcaagtggaacagttcccatttcgatgttatcatcaaattttactggatgcctattttgtattctttttatagtagagtccagctcttcaataaacgattcatcatcatcctagcatatcgggaatgacattttcatcaatagtgcatattttatcgttgttatccttagcatcagtttcagttgattcaggttctagttgctcatcagtttcattttggatattatgtattttttgaaccaaaaaaattaaattatctttgaatcttactaagaagtttgattcattgactatgagaatatcagatttttcgggctcaatattgacatctatcttatctgttggaacttctacactgatgtaccaaacattcggtgacaacaatttgttttccaaatatgcttctcctaccaactttgaaatttcttttccaaattttaaggataggtttaagggtctattattcactgtaagaactttcaacggcgttttgacattgggtatatcctgggctctcatttttggtaacacgcattcctacattgacactgtaactactgcttatagaatcaccaacagtgaaattgatattttcatccgttaaccaatctttacttctaatttgtaaaatttgataaataaattgagttctgggaattctgttgctgtatgagagagtatttagagtttttactttattaaggggtaaaagtttaatatatttaatctgaaatctaatagaagggtatattaacgcatatttagttatcaaactctcaatttctttgatgtacttggatttatgactttgtaaaaacttatatcttactggcgttgctttgaacaatccataaattttaacagttgtaccttgtaaacccgcctgaagagataggagaactagtgacagttcctgaattagacactgaccaagtttctgacatcgcatccgaactggttctagtacttatcaccattgattcaactaattttgcaatcaaatttaaagcttcacctctaaatccacaggtgtctacaccactcatgagatcatcaacagagtgtagttttgaagttgtataattcagacacatcatatttctatcttccttattaacaccacatccatcatccttgactgatatgtaatccaatcctgcagagtctttgtctatttctatctgaatgttatgtattttcgtgtttttaacgccgccaatgggtgtattaattccgatggcgtcaattgcattttctaccaattccttcaccactgataattgtgattgaatcatactcgtggacacaatggcggcagatgctgcctttgggaaggcgttggatcgtcatctgtatctaggtgtctggtgatgcactgttcgggcttcatgtgtattgatcaaagtccaggaagaagttgtagtgccggaacacgaaactttttctttcgtgagcattttacaccaagtccgctaataacaactctccttctttaacttcaactcttagcctcttgatcacatacacatagtacattacacataagaagaaacgccttttcttagacacggtacaattatgaacatagatattaaaaaactcattaagtttgttggtcctggtcttttggtttcatgtgcctatatagaccccggtaattactctacatcaacagcggccggtgcacaattccattattcacatttatttatcatattactatcaaatgtatttgcagtgatacttcaatgtctctgtattaagttaggtactgtgacaggattagatttagcagagaattgtagaaagcatcttccaccttggctcaatttcattaactatattcttgccgaaatagcagtaattttcactgatttggctgaagttgttggtagtgctattgcgtttaacattctttttaatatacctttgaaatggggtgttattttaacaattttagatgttttagctatcatatttgcctataatccagatgggtccatgagacatatcagaaaatttgaaatcttcgtatcttttttagttcttatgacgtttttctgttttgttcttttattagataaggtgcatgttgaatcaaagctagaagtattgaaaggtttcattccttctaaaattattttcaaagaaaaaagtgcaatttacttaagtttaggaattatcggagctactgttatgccacattcattgtatttaggatcaaatttagtaaaacctagattgagggaatttgatattaatgctggaacttatcaccgtgaaatgaattacgatggtgttttatctcacaaaccaactttaagcgcaatcaattattgcttgaactattcatatatcgaattgatattatcattatgtattgttgctgttttcatcaattcatcaattttaattgtttctgcagctgcattatatggtaaaccaggagcagaagatgccgatcttctttcaatatatgatatgctttgtaactttatttcaaagcaagcaggattgatttttgcattggctatgtttttctctgcaattgcagcaggtgttatatgtacaatgtcaggtatggtcattgctgaaggtagtgtcaaatggtcaataaacccattttatagaagattgatcacaagaaccataagtataattccttgtctgtttatggctcttttctccggaagatctggcgttgcaaaaatcttaaatctatcccaagttgttctttctttgatactaccttttgttacagcacctttgctttatttcactgcaactagagaatatatgaccgttgaaatagatacacatgaaattacagagcagaatgatgaatctgcaagcgaagctactcctttagttgacaatgaatctggtttcaagactgtcgatttttccaattctaacattacaaatatccttgggtttttgtcctggttcataataggatttttaaatatttatttaataattcaatggatcaaaggagaagatattcacttttaatgctcatattgtaacgtttgagcttattcaaatccttttcaaatattaatgtttcttttttattaattaataatacattatacataacatacacagttcataattttaagtttttatttaaaccattaaatcacaaacttgccatataggcatcatagttttatagtttataaatttgtgacatcttcaacatcagctttaacagtatcgtctttatcttcttcaattttatcataatcgtcatcttcatcttcagcttttcctgtatcatttgtagtatctttatcgtcttcatcatcctttccagtatcgtctttaatatctttattatcttcaacatcaatatcatcattgttatctttatcatccaactcagaagtttttagagcagctacctcatcggattgagtcttagcttcagtatttgcgttatgattatctttagtaataacactttcatcttctggaactttactctcttcttttggttcttcttttggtttctcttcaatctttggagcagataatttactcaatatttcagataacctttggtcatttttatcctggttctcaacaaaaaaggtatttgaaataaattttttcttgatttgggtgattttaccattaggtggaaccttaggtctattatttctttgctttttgtggtaaatcttcatcttccactaattctaagtactcctcatctgtaacttcacggaaattttcgtccacaggttctccattttgcttttgaacttgatatttctttaactgcttaccatacattattttagttttaaataaaagatcatcataaaatggaagtaataaaccaatttgtgatggaatatcctttttcatcaactttggaaatttaacctcatcaaaatcttcataaattcttttagacatactcttattcatttgattaaattgatgcgataattttcgattgtaataaatgtaatggaatatttgaagtcaacataccaaattctttatctaaacctaactctttgaaaccaaagaaatcatcaccaatttcatttgaaaactcaccattaacaaattgttctgagtcatcattaaactgtgtttcactcaactcttgcatgcttggacgtaataaatcacataaaaagttttctaaaccgcatttaagatcgagtaactttttgttttgtttaacgagttgttctttataatatgagtaaataacatccggtttctctataccattatagttcaaaacaatttggaatacttcacggcatgttaaaggttgatggcctttaataggaattttgttgattgatttagactccaattgttgtttgatagaccttcctaaattctccatgtacacttctgcaacttccgttaaaagagacatacatgattgtgaagtttgttcaaaaccgttcagcatcactaatgcagaaacagattttttgagtgacgcagaagcaacttcctctgtcattcaaatctcttgttcctaactttgacattggatcaatatcatcaaatctgattctaggatatgttggagcaacaaattgtgatttgtgaataaattgtgtagtttgcatagttctaattaaattaattttgaaacaaactcttctgatgtcttgcatcaaggaaatattttctaatattaaactgtttgaaccttttaatttgaccttgaaatctgtatctggtaaatcattcaaagatttaccattctcaatcatatcttccaataatttatcctcaagtttgtcaaaatccagattttgatgtttgatagctgggacaccacttgtcacatcatattcaattaagtatggatcatcattttcatcaaaatacttacgatttctatgtaaaactactttgttttcatcttctagatatttcgagaagttgtacatttgagtcttagttctaactgatgcttcagcatttggttgaattttattatccttgaacaaactggatctttgattacaaagtttgtatcttgtacttgaagtcaacattttccatgttgaaatttcaagatcatcggtatcatcatttatttcctcaatattcatagtcattcgtttttcatcttcaatatcattttcttcgacatcatttctatcttcttcctcatcttcatttacttcttcctcaacatttgtttcagcaacaattttctcagtaccatcaccattattaattgcaccactagcagttttatttttatcatccaactgttgtatgttttcactggaatctgctgcatggtccgttgctttagaatcagtggtttgctctgtagctgatgttgtttcagtggtctctgaaatgacacttccgtcatcatcgattaaaactgaagaagtaccttttcttccttttttagattttgattgagttactcctcttgtcgaagttcgtcccgaagtgacgacattattttcattattagaaccttccttttctttctctttttctttctccttcagctctaattccgcagcttctttttcaacttctgccctgtctctaatgacaatatccggaattaatggaatcaataataatgttttctttctcattgcaagagcatcaactctcagaaaatgtttaggatctgaattgtaagttaaacaattttgccaaatgagcatcaaatcatcaacaaactctgtcttattttggtattgcaatgttttcaacttttttaaaacggtattcaagtccattggctttttaataatttgatagtaatttggtgcttctcttttggagactttgttcaagaatggagtagaatgttctgtataacttcttagttctgtaaccaccttttcgcaagcttcataaagctcttcttgaccaattctatcataattagcccatttagatctgttttttctgacatccattatcaagtttttcaactctacatcagtaacacccagttgatctctgttatcatcaatcttcttaagtaaatttttcagtgataagtttgcagctccacccagagacatcaatttactcacttgtttagaatctgaatcctcagcaacgtcatgagtttcacctgtatcagcatcttccagtaacttcagctgttgatcacttctctcaagctttctttttttcagtatgtttggtagatcattttcaaaactgtgatataatttgttaaaatttttcattaatttgagttcattttgcttttcaatagttgattcaatagcggacgaagtacctaaaatcggatgcaccatttgtcctactgcaacttcatcttcggttatctcagaaacacttggatattcaggtttttccaaaagttcagccttacttactattaaaattgtatcttttgttattggatcaatagtcaggcttttggttgaatcatttgaatctgatgaagtttcttttttatcatcattagtttcttccatttgtacatctccatcttcatctttgtttttatcgttttcattatcactttcctcatcttcgtcataattatcatcttcgtcatcattatcattagttttattctgtttatatattgccgtggtactgctagatacatcattgttttcactaccaccatttccatcggtaatttgtttctccgcttcagtcaaagtgtcttctaaaagacgaaattctgtaagtatgcctttatcatcagtataaaagtaatcaattgccttttcatataaaagatatcgtattgttgcatttaagtttcgaagagttggataccctggtttcatatacatattttcattagaattactatcatcaccatcatcttctgtaaaacgaagaatcaaagatcctttcataaaatccgaccaaagtttcatttctagttctttattgttataatttggatataatatggtcttcagtagattaaactgttgtggtgttagaaaacaattgaaaaaacctgtttggtatagttctttggcgaaatttagtaactgttgatcatttcctgttttgaaagcatccaatgctctttttcttttcatggagggcatattatcttttataaatacctgtatctacgagagtattgtttctttaaagatgcactgaacacgtgaagagaaactacccagagatgatgatgaaatgctactacaatttctttgagttgtgtatttacataatagaagattgaaattttgaaatttattacctaatacacttcatcacagtaatttatcctgttttaaaagcattaaaggttatgacattgggcttactgcttcttccttcaagggttgttctaattactttgtcatcatagagataactataaaacaagggatataccaactataaggaaataagacatgcctgattttgtagatcaagttttcggttatacatcgggcactattgaaaaggcttcatcaatacttcaatccagttacgatgtttctaaaagtgcattacaatattcatacgatacttctaaaggtgtaggtggtgttttatggaatggtacaaaaggtgcatatagtacaattcaaaattcaataccagagaatctatttgataaaatctcctcacaaatatacggtcgtaataaaactgctatcaaacctgaagatataactgtatcaggtttactatatcacaatctttcaaattatgttattcaaaataggaaagcaattggtatttgcttaactttaccaacaattggtgttactgcattccaattttacagattatttgttccttatcaaagaattgctcaaagattgaataatagatatcgttatgaagtcatcctcgttatcggtaacatgaattcaacatttgtttccaaattggttttcgatctgaataatagaggttatgttgtttttgtcactgttactgatgaggaacaacttgcactggttgaacatatcaatgatcctgatattagaccattgatgatggactacactgatgataatactgtcaaaaatgggttattaaaattaggtaactttttggataacaaaattgattgtgctcaagatgattcatattacaacttcaaaggtattctttttattcccgactactccaagctaccgaagatgaaaaagcttgaagatataaatacaaaggagttcaaaagaattaccgaaacttatttttcaagatttaatgctctacttcataatggcttactcaaatttatcaaagaaagtaacaacagaagacagatagttgagagtagtaatggccaaaaagtcaaaggtggttttgcaaaattactgtttatcaattttatggttgacaataataatgataacagaaaaataattcataaacttgcatatgatatcaataaaagtttgtttaatacattataccaaagtgaagctgtcacttttaaggatgcttgtttaagatttattaatcaatccacaaataaatccttgattgatatggccaatttagacatcgtattacacaagaattctaaatctacaatgattccaaactatccaatattggatatgttttcttctttaactttttcaaaaatgactcctaaagatattcaccataaaatttatgatctattaaattccgaatatttgagcaagacatataatatggaaggttagttattgcataatgtttttttgttatgattattggttgggtttgtatcttctttttatacatatcttttttgatttaatgaattttgtccaaataaatgaataaacgaatgttcaataatgttactattactatacatttgactaattattacataactatgcgattattttacatcttgtaactgtgtgatcttccaccgtgccagcggtgaaatcagcaatgctcaaaataccttttctatctaaggcatataacttgtatccatcaacatcaaaccttatagatgcagattcctttactcttgatgcaccagaaacatcaaaaacatttacaacatgtttattatcattatcatccatcctcggagttgtcatgatgtatacattcccccttctatttaaaaacaccacactatctcctcttggagaaacacaacatttatgaattgttgatcccacttcatctattttgagcaataacttaggtttagcaatcccatcaggtccagagattgaatcaatattagaatcaattataataggttctgaattatgtgaggatgaagtgattgacattattctattatcaggaaaaaaacaaatgtcagtaataccttcactatccaatgaagtatctaatctacgttgagacttcatcactaatgttggtttggaaggatcaactaggctgattactaaaaacctagattctagaactgtagctactgataacaaacttgaatcagatgaaaacttcagtattccaattgggtctctatatggtaaagagaatggtaacgtgattatttgaaatgatgattttaaagtttcaggtatcaatttcagtaatatgataactgattgttccatttcagtatatttatcctttcctgtaatacctaaagcaacatattcttcatttggtgataagtctaagcatctgattggaaaattgcacttatatgtgaaaacacatcttccattttgatttaaatctataatacgcaagaacccttttgttcctgaaataatcaataggttttcagataatcgacaatataaatgctcccaattctctaatgaactgaaataactggtatttgtagtggcattcttgttattgttgtcagagtatacgtgaaaattagagttaagtaagatatgctccttcttcattttttttaaatgatcaaaatctggtccataggatgcatcggatttcccacaacaaagtaatgttggtgctttgttcggtgtgtccgtatctattgaataaacttcccatttcttttcattcaaaagcacaagtttggttatatttggtgatattcccgtttgaatgtataattttgtttttagaagtatattattactatgaagattgaaattataagtttttctgaaaaatgggaagtttttagataataataattccttatttctcagattgctcttttcaaaactaaactttttggaaatgacatcatcactattgtttgctgtgctgttaaaaccattcactttcttgttttgggtctcattttcattattagtttgattagaatttttcacaccaagattttgagtggatgttctactaaacattccattttcactgctacccaatgaattattaatcgtgtgtgatgctggtatattgttgcctgatgaagaagtggataataatctagtgagattagagctattttgataagaatgttttgttctttgtttatgtaatgatcccaacgaagatataactgaagtgtccgtgggtgattggacatgatcttgggtgttataactattattattgtgaagttcctcaaagtgattatcacgtggagagtggttgcttggaataatagataatcttttagtttcattcgactccacagaagatgaattttccacttcaatcagtgcttcattgaatgcagttaaaaaggagaaattttgaggttgtgattgtatctgtttaaaaggtttcttattactgtgagtttgttgtaagtgtttgccttgaaaggaattttttcgttgtttttctgagcttagtttggaaaacattgaagaaatatctgtaatatctctatctgtaggtgtagtaatatttgttgatccaattccatcagaatttttgaaaattctgagttcatcacctaatttggtccaataaatatataaatttttcatattagtagcattaccaataattttagtatctgccttctcacaaagaggacatttgaaaacactgtcgttatcaaatgggttcccgttagtaaatggtgtggttttattggcattggataaaccatttttcatttgtatttttagtgtatctattaaatttcgtgatattatgcatccacaactaagtgtacatggatcatttactggtgcataagcaattgttggtggataatttgcataatcataataagcaggaattgataaaagaattttcaaatgattaaaaatatcctttggagtgacatttggtatattagtatcattcattgatgatttatttgaagcataaatatattagaaagttatgattcagtttagtttgagttatttgaagtttgtgataaaacagagtgtataatcttggtgatgaaatcggatggtatataggtaggccttacaaacttgtttcaaaatcaatgatgtgtgagaaatttgaacagtggacgtcttttttaaaatcgatcgcaatagtccatctgggtgactttctctttcttttggtttataagttcacaaccagatatgtctcaatttcaagggtatactgtcgacatttctcttaaaggacaggaagggagaacaattagaggaattattagcaatattgtcaatagagatataactttgaaaaatccagtttatgttaaatcagacggctcatatgagaaagctaatgcagagagaattacattaccagcagatactattgctgacttgaatgttattgaattagcaaaagagagtaaacaaagtcgtagatcaaagaaatcaggtaaaaacgaacaaaatgataacaatattaaagaaaatacagaggaaaaaacaagaaaatcaaagggaaaagctaatggtaatgccaatgttaatggtgatgtcaatggaaatggtaatgaaaaatttgatgctccaattgttaccaaatatgttgatatttacaatgaaaagccgaagagagttgactcacaatccaaaaaatcaatacagttagaggaattcgattttgcatctaatttagaaaaatttgacaaacaatccgttttcaaatcaatttcagaaagtgataatgttgagcaaagtgacagattagtcagctttaataaggttgataatgttagaaaaggtaaatctgataactatgacaatagtgaaatggttcttaagaaaaaatctgatgctggatgggatgacaataacgaatataattattctaatgttgttggttcctcggcaaattctaaagtatctggtaattcttttccatcatccaaatctgataatataagcaaggattctttgaacagtagacaaacatccaatatttcattagaaaacaatagaaaggcatcaataacatcaacatttgctcaatttcacagtaaatcacacggtgaggcaccaattccaacctgttccacattacaattatctgaaattttccacttatgtaatagtaaatttgatattgataatagaatattgattgaaaattcatctagaagtatatgtgatgtaattatcaatagagttattggaaatttccgtatcagtcttaagaaccataatgaaccaccagttattttagctgtagttggaaataataaggccggtgcaatttcaatagccactgcaagacaattatttaatagagggtttaaacttgttttatacctcctctatgattctgaaaattcacaagatgaattattgaacatagttgatcaagaattgaaaagatacagtaactttggtggtaaaatagttactaaattatcacaattaaatcaaattttacatgaagttgaaaaaaatccgttagaattgatactggacggtttacaaggttttgataatgatattaatgaattagaggatgtagaattgaaacaagcaagtgagctcattaattggtgtaatgatagtaaggttccaattatgtctatagatattccaactggattaaacccatcatctggtacatttgaaggtgaagaggacagtatgattatcaatagtagatatgtcgtttctattggattggcattatcatccacattaaacatgtacaaatttggatattttgagaagggacaagttggtcatttcttaattgaatgtggaattccacgtcgtttatttggaagcaagggaacacttcgcagatttgatcgtagatggtttgcagagaccagcagcattgatctcaatgtagcttaaatagattgaactatagattgaatattagaaaattacgtaactctttaaaagaccttaagagacctctctcactttaaatttatagcttttatttttaagcgccgacaatcaaatgtttcataattaattgaaattggcaatttgttgctattaattactgcatttaagaaggttttattgataggttacattgaccatattaagtgaaataaaagaataatgactgaaagtgaacagatagatcagctagtacaaacaagtcggattgtttatactcctgagatattattagaattaaaacaatatgcagtacttccctctgattgcactttaccagacaaagaattttatagatttcattcatcagcttcagagtcattgaaaatggcaaactatatacgcaatttgaagaacccaaactttagggcaaagcataagttgaattcagggtcaaatagtaaagaaggtaaatttcgtagtcataatagtcataataatcataatcattatggaaatgatgagtcattggaagaagatgaacaacctgcttggttaaagaaacagatttcaaagttgatcatagttttgaaagatatatgatctcaggaacgcatacagctgatgatttggaaaaagagaagctaatgtttcactctgctcataaatctaaaggtaaaagacatacatctaataattcacattcatattcagaaaaaatagaggataatgttacagagaatagttttaatgatagtgcaactattgataacgttcacgagggtgaattgggtaatatagtgaatgatactgattctagtaataaaagtaataatagtggtaataactataatctggaacttgaactggagaaacaatttcaagatcctgaaattttggggcctacagaagaagaatattttgaatctttgaaaaaacaagaggaagaaaagcaaaagaaacaagaagaagatgcactcaatagtcaatctaagaagacaagttcagtagattcagatttccaatttgctatggaacttgtttctaaaaaggagattgataactcttttttcaactctttaattcaaaaaagtaccgataattctaaatcaaactctggatctgaatctgccatgaaatccaataatgcattaacaggatcatctgaatctgctcctgcaagcttatcacaatctggtaattttaatacacttaatcaaaatatgacctctaataatacaactcttcaaaatactcctcaaaatatgctacctccaggattatccgtgcagcaaatgcaacagatgaaacaattacatatgaatcaattacatcaaatgtcactagcccaacagaattctgcaacccgtccacaatcaagtgattctaactctaatagtattatgaatcctccaatgggcacaccaaatagctttccaccaggaatgttacctaactttcctaatgcaaacaatttacctccacatgtgctacagcatttactgcaacaacaatcaaacaataatttcccaccagggttcttacaaaacctacaacaacaacagcaacaacagcaacagcacggtcaacaacaaagtcaagatcaaaatcaacaacatcaacagaatcctcaacagcaccaaaatcaacaaatacagcaacaaacttcagctcatactgatcatatgactggtcaagggttgcaaaatgctcagaatatgcaatttccaccgggaatgggaatgggaatgagaaacggtatgaatccaaatatgattttgaataacaatatgaaccataatatgaataacataaatccaaatgtgaacccaaatatgaggtttcctcctggtatgcataataacttaacaaatacagggtccataggtatgacaatgcctccgggtatgattccaccaccaggaatgatgccccctcaaggtatgatgcctccaccgggtatgatgatgcaacctcctggtcaaattccacaaagattcccatcaaacttaccgccacctgatcaattaccatcaccttttaaggagaaatttttaaatatacagagactgttgttacatttccaacaaaatggacaaactccgccacctcctttagtaaaagaaatgatggaatttcacagattacttgaagctaagtttggtaataatcaagaatctaatttaccttaattgtatatcgattttagaagtgtaatatctttcaatacggaaattaggttacaacttgttaaactcagataatatagtacaaactccctaataaaataatttgtgagtgttgatatttttttttcatgcacacatttgattgaattttttttctaactgtaatatattttcctactttggattaactctgttgtaaataaagtacaaacgttagcctatttattttcttcccatatttagtataaagatgaaaattatacagcaccaggataaattgatttcaaattttgaagcatatcaacatgtagtttcaatccaaaaaaagaacgattgggggttcacaatccctccacctgaaaagaaacgtcgaggtaaatttaacccacaattacttgatcttgaaatcattacccgtgatttgagtcaatatttagttaaagtgaatcaaacaaatgaaagtacacaagaaagttttgttggtttaatgttagtgctaaacacatatgaaattagaagttatagaaaaattaatgattatgaacttactacctcgttcacttgtgaatttatatgctataattgaagaatgtgaagacagatttactcaagaacaatgtgaagatatcttagcaaatgttgagaaattctatccagctcctcaggtcgatgatgaagaggctgaaggtcaagaggaaatggatgtcgatgaagaagaacaagtggaagaagaagaagaggaagaggacgaagaagcatttgttcaagatgatggtttagaacacgaaggttatgtaaagaagaaccaagataaagaaattgatgaagtagatagttaacgagcttaatttaatttcttatgcagttttttaaataattataaacggtatacttgtaatgtacttctcggtaaagaaataatactaatgtaacgctatatacatataagatgtataaatttatagagaatattttccaaatataatgctagaacaagtttagtatgtcatcatttccaggttttttatttgaagaatctgaattttggaaaggagctggtgtaggtgaaggtgatgcagttgcactatcaaatccacccaaaatgcttaaaagattattacttgcagccgatgatgaattatttgtagtaccggaagttgtatttaaaccagaaaatagatcatttaattcgtttaaaatatcaccactgttatcccctccaagaaggccacctgcgttgttattttcatcatcttcgttgttatcatcatcatctaagtctaacaaattatctgctttaactgcattactgacaatttcgttctttgcaatttgttgtaagttcctctaattttttgttctgtaactcagatgatgtgaagaatgaatcagatccatctaatttaataaatgatgatgcaggtttataaaatactgaacttaagtttcctagatcgttgactaattcttctaaaagtcctggtgtgaatgtttcaattgctgaatttaagattggtaatttagcaagtatgatttcttcttgtagctttctgtcatcagttgaaagtaatctccagtataaatatgccttatctctaacgtccacattttcaacatcctgtgttgctttattcaaaatagtttgtaacaagtgtggagtatttggtgttggtctcgataaacttattttaacaactaatgataaagcagcagattgcacagttgactcaaattcatcaaaattttcaactatcacattcaatttatcttctaaatgtggtatttctcttggatattcacttaaaatccacatatatgatgttaatgattcggatctatttaaatcgtcaaatctcaaatctgcaataacagtaatgacgttggaaatgtactcagttgggtatcttcttaaaatattttgaataaccaccacaatctcttcaacaacaaattcacctttattgataaataattcatataaaatttcaactgcttttttagaacatttttgaattttaacagcaatttgtccaataccttgtattgctctgttaactaaatcgatatcaaactccattgaatattctcttaattctgatagtaataacatgcagttttcttcatttgctattcttgtcatcagttcaattttttcaagtttcaaatatagaggatcgttgtatttaataaagaaagcccttaattctttatccaaaatagttggatatttttcaagtaaaattctaatattttttagtgcaacaaattgaatttctggggatgtgttcaatagagagcataaaggacttgataatctgttcaaaacattgttactttcatttgaaggtaacttatttaattgttttattaaaactttaatggtagataaaacaacagctggattttcatgttgtaattgaggagaaattttttcaattatattatgaacatcacttaaattattggcatcatactccaataatgatgacaatatagaaactctaccccattcactacactcattcaatgttgataataatttattcaatatttgatcatcaattttaaaaacatttttctgagttttctttgatatttccaatagagcagcaacagaattagcaacaaccatctgatttgaatcttcaactagttccaataaatattctaggaaaccttgttccatacaaactgttggattcaattcaaataattttgcaacacaaataacagcagttttacgaacataaggattatcatcctttaaagttcttttcaatggaatggccatataatctaccattttatcaactctaatacaccccattgttctaattgctaaagatctaatcaatggatttggatcttcagtatctcgtataaatgtatttgttgcaagtataactaattcagggtgagtcttggcataattcattaaataaaggtacactagttttttctgttccaagtcatgagttgcaatattctttaaaacatcaggaaataatgcagaaacatcttttccggttgtcattgccgcaatcacacgttgtattgtatcctttctctcatcagcgtattgtgaaacaagacccgatctgaactcatagttttcacccttcttaggaatattaaaaaacttcctgaatttcctttctatgatctttgatgtcattgtaatttgaagatgggctgatcagggaaggagagattcacaagagaaaaagaagatgtatcaaagcatccataatgaagatctgctgaacaaaacaatctcgaattaaatttcactaacagtggtaggtttacataattttcattcacagaatcattaattggagattttaaatacttatatcacttttccaaccagctaattacttgcaaatgccaattgatctacaactccatagagttcagaagcttttgaaacttctagggaatccacatcatcatccaaaattcattcatattgcaggtacaaatggtaagggatcagtatgtgcttatatttcacatgctctaacagcatctgggatacgtaatgggaggtttaactcaccacatttggtaactcctcgtgactctattcaatgtgataatcatccagtaagtgaatatatttacaatacaagtaaagctcatgttcaaaagacaaatgatgaattcaatataggatgtacagattttgaacttttaacctgtacagcatttgaaattttcagtagattaactgtaccaattgctattttagaagtcggtgtaggaggtagaatggatgctactaatgtcatacctgcagaatctacacttgcagttggtataacaaaaattggacttgatcatcaagggttattaggtaatacgattgcagaaattgcatatcaaaaagttggtatctttaaagaaaatgttccagctatcattgatggaacaaatagtgaaattgttttagaagttgctagaaaggaagctttaaaactgaatagtcaattgattattgcaaacagagctgataatgatgaaaatttggaacctggtctgttaggtgattatcaacttgataatgtatcagttgctgttcaaatcttgaaaaatattaaagacagtagaataacggatgagagtataaaaaaggggatcaaagatacaaagtggccgggtaggctacaattgtacaatttccaattgaaaaaacttgataaatataagaataatgaatgataaagctataaaaatggtattagatggtgcccataacacacaggcagctatagaattgggtaaatgtttgaatgatatgcgaaatgattttaaatcatttgtttttgtaataggtataacaaaggggaaagatgttagtgaattgtttaataaacttattacaccaaacgatactgtcatttttacacaattcaataaaaatatagaaggaatgccatggattgaaccaactgatgcacaagaactttcaaatgaactaaaagcacagaaggttgattgtcagaacaatattgctatctccaatgttaatgatgctttgataaaagcgattgagatatctgataaaactggaggtagaattgtcgtttgtgggagtttatatttagttgccgatattcttaggttataaatgtttttttctttcttggtttgatagatagtgtattatagaacgtttaatataaaaggagtgtatatagttagataattgagacgattcatatttaaatgagtgtaaaatagttgaaaaataattcaggatatagtaaatcattcggtttccttaataggtttacctttttgtacacgtctgacatttttagaccattttttaatatcagacttgtattttgagcttatgtgtattttatcatcatccaagaaatccgaaagaaatggatgagacattaaactccaaggacattgatctttgattctctttctttaaacagagagaaataaaatcacaaagttcttcactataaccttcttttgttgataaacttggaggtttctcattaacaattctttgtaatagttctaaaattgaagttgaagaagaattattatcattagcaaatgctaaatttcctgatgctaattcatagagcataatacctaatgaccaaacatcacccttgacagaagtaaacaccaccttgaattctctctggtgacatgtaagttgaagtacccacaaatgtatcagctaatgaatttattaattcacgagacacaccaaaatcacataatttaactctaccctttgatgtcagcaatacatttgaaggtttcacatctctgtggataattctatggttatcatataagtaaatcaaacctgataaaacggaatatgctacatgtttaagcataaattcagggaaagaacctgtaattttgaaaacatgtgcaagagaaccacaatctgcatattccatacaaattacaacatttccttcatttaaaaatgtaccataaaaatcaatgatgaaaggagaattacattcatgcataattcttaattctctcaaaatttgtgattgaataacttcctttgcctcaagatgaacagttttacgtgccattgtcttttgtgatggtaaatgtaaaacttttgaaacagtacctgattgaccagaacctagttttttcaaactgactaattcatctgcacgtattgacatttgatattctaatccaagttctaaattccttatattttcaattaattcatctgcatctatacgtctctcaggatctttaacatttaataatggagaattgggtatttcagaattcccaatatttgtatttattggatctaatgttaattttttagcattacgtctattcattgatcttaatggaatttctgaatcgatactatcactactactattaaatttatttgatttactactcataagtctagtagatatcatatttgaatcagattgttgaactataacgacatttgaattatttcttgtagatgatggcctatatggagttctaattggagttcctggtgtcattgtttcgttatcagttaataaaaatgcatcatctgctgaacttgctgagaattgaagaggatcatcagtgaaatttctataactttccatatttgtattattattccgtatatttagactcaattcgggaccttttcttcttaatgaaagggatggtggttcactattcatatttttaatcctttggctggataatgattcatttgacatgtgtatagtttgaggttgcttaaaagaaagtgacggcatttcaggtaacttcttatttgcgctagccatgatcaattattattctactattaattagaattagaataatcaagtgatgaacagatgttgatgattataataatataaaattgcaaacctataatttaaaacaagaaacctcttgatactttcccacaaactttaaaatgtgttttaagttagagactggaaaaaagaaagacatgcgcgtaacccatagaatagaatgggaaaattgtattacaactgtaagtgtttcatgggatcttcttttctgggtattttgggttgtatcttgaagggatcaagggtaagctataggggtaattttagagttggatatatatcaagaatgaaagaggttcaatatggtttgaatgataaagtttatgttttccagggtccaatgctttatgatgcacgaatttgtcgaacttttgatccaataacgcaaaaagttcactattatgatgaaaaaagacgtgaagatatgtatgtatcacctgataaaaaatttccgactgaaatgctgacagagaaatgttatatggttcattattcaggatggaatgttaaatgggatgaatgggtattaactgatagaattaaggaagttaataatgaaaatacaatgttaaaggaaactattcaaaatgaaatacgagagcaagaacgtcatcaacgtgaattagagaaggagaaagagaaggaaaggttaaatgcgaagaataaggggaaatctaagtccaatggtaagacaaatggcgttaatggtaaaggtaaaaccaaggaagggagtaaaatcaaagaaaatggaagtaagcaaagtttgacattaacgttgcataagcctaacgataataaaaaacgtagtatagagagtaatggtggtggtgctcccatggttagtaatggttccaaacgtgctaaaagtgaagataatgcagacgaaaatgggaatatatctttagttgaacttataaataaaaataaagtcaaaagaaatagcagtgagcaaacacattatgaagctaaaaatagatttacatctcatgaaataaaaacattagtacctgatagcttgaaaatcatattagttgatgattgggaaaatataacaaagaataataaaattgcatcaatcctcgaagataaaactacaaatttaaatgtttcgatcgtattgaaagattttaaaaaatatcttcaatccgaatttaacgatgttaatgaactccccattttaattgaactaacagaatctattaaattatattttgatcaatgtattggatgtttcttattatatcgatatgagagaccacaatttaatgaattaattagtaaagttgattcaaatattgaattaactaaaatatatcaaccgatatttttattacgattgttatcaataatgccaagtatattaatgatgaatgaagtggatcaatcagttatacgaatgagtaaaatctatttggaaataatcttaacttggttagaaagtaaaaaggatgaatatttaaaaactgaatatgaaaatcaagcaccttgggtatcaataatgcatggatgagatgaaagtatttacaatgtctaataatttatttatattatattctattttttataaataatgttacaaaagcataaaacgattaacttgtttgatttcatatataaacgatatcatcaacaactttcctctgcatactattaagcattttatcaatttctttttggaatgatactagataatcactacttctaatttgattattttgtgaaagtgaattatttgaaccttgtgatgaatcactactaactctatgtgatgtgaaaactgatgatgaagagtttagtgatgaagaagattgaattcttttattaactaaaggttttgtttcattaaatttaatcgttgaaatcggtcttggttgatgatttcttttcaaattatgtgtactcaaataagtttgatccatacataataaattatgaaaatttgaagtataatcaatttcaacaatctgtttatttgatgctttaaaagataatggagactctaattctgaattatatctagttaaattaccatttgattcaccaacccataattgattaccaagccatttagttgatgtaattgaggtatgagaattatttattgttttcaaaggtttatttttacgaatatcccataaaagtactgagtctttaatgggatcaattgcagataataaatattcgttatcatcacaccattgaacatttgttaaacctgagctcaattttgaatttgagaataagatattttgatcattaccttttaaatctaataatctaataccaaaatcaccaccaattgctataagtgattgtaaatttgaatttagtgaaacgcttgaagtattattagtttgtaatattcttaatggagaatgagatcgtgaactatcccaaagaaataaatgatgatcataaagtgaaactaatgaattaaaaggaattgaagaccaagaatttggagttaattggatttccgaaattgttgttgataaatgaccgttatttaaacgtagtgaatgtgatagtgatgagtttagtttatttatttttttcctatgattaaatcttttaataatttcagcatctttaaatactgaattttcatttaatggtatagcagataaatgaataataccatttgaatgacctgataataagaatttaaaattattatctccttgatctgttggttttaaaaactgtaatttatgaacatctggtagagttattgaagataaatgaatgagagaatttgcaacaaattgatatactttcaaattttcagttagtgaatttgagccgactataattatatcattatgtttagaaaaagcaacatttgaagctgtatttgatgtagatgtttcccagtaatttgagttaatatttgatggcattgttaaattgaatacgattggagaattgaaaaaaattgtggttttatttatttaaaagagtgactgttagttagtaatgtacaatgtttgtacaaaatatttgtataatattgtctaaatgattgaatgaatgagtgaatgaatgaatatatgtagttggtaaggatatgagcctttgaacagatcaaagggagctaaataattgacgaggtcttgagcgtgtaacgtgtatttgtttgttattgaccaataactaagcaccgtctaaataaacaaagaagaataatatagagttgataaacgaggaagacgttgcattttataaacaatttgaacaggggggtaaagtttgtgtaaattgataagaatttattttccagcctttagcaattacacgatcttaaaacaaagagattttgactggaaatacaatagggaaaaataactaaaaattatgaatagtaaaattaaagttgagcctccagattacctaattgggttaattaattatccagccaccttataaatgacaataaaagttagtaaaaaatagcatgataagaagatagagttttagaaagtttaaatagggacattgtaaacatgtgtttattgttaattcataataatagttgttagtttaccgatgataatagactaaattcccatgataaacaacattcataaataatcctatatgcattgtttaatgtccattgatcatctccagtaaagaaaaatatcatgaaaaatgaaaataaaaataaacacagtcgcgactactagaaaagcggtgcaccggtttaatttaataaaatttagtcattgttagtattaatacttagtaaagataaatttatttttcaattggctctctttatttaatattaatacaataactatataggctggcgccactctatattctgtttagaaatgctttgtttcttagatttcctttaaattattgtttttatttgtaattgtttctttgtatctgtatccaggaattgtatcaatatcatatataaggtaaatacagacatttcaccttataatcatattttcccttattagattcccttcacagattcacacgattttatttattagattcaaattaaataattagatagatccacatatattaattattaacaaataatgtcccgttctaaaattaccgtcaaggtactttcagctgatggtttatataaacgtgaaatatttaaatctcctgatccatttgctgttttaacagttgatggttctcaaactcaaacaactgaaactgctaagcgtactgcatctcctcattggaatcaatcatttgatttttctgtaactgaaaattcaattttaattatacaagtatttgatcaaagaaaatttaaaaagaaagatcaaggtttccttggtgtaattaatattagaattggtgattacattaattttagtgatccaacaagtgaacaaacagtctctgaagaattgaaaaaatcaaattcaagtttaccagtatctggtaaaatgataatatcaatatctcataaaaataattcaagagattcaagagatccaactaatttttcaagacaatcttcaagtataacaaatagtactaataataataatactgctactactgctactaacaataatatatcaaataccccacttaataataattcatcaagtcaattcccaggaattgcagcttcaagttcatcagttgcaactgcaactgcaactaattcttcatcttatgcaaatttgaattcaaataattctgcaacttctgcttcatctccttcatctgctagtgcaaggcaattttcatcatttgaagatcaattaggtagattacctcctggttgggaacgtagaactgataattttggtagaacttactatgttgatcataatacaaggacgacaacttggaaaagaccaactttagattcatcatcaaatgatcaaagaaataacaatattaataataatacacatactagtactaatataataggttcttcaaataatactttaaataatcataatttaacagaggaagaagcttcaactttagaagcaacaggacaaactgtaccaggtttaggtgaattacctccaggttgggaacaaagatttacacctgaaggtagaccatattatgttgatcataatacaagaacaacaacttgggttgatccaagaagacaacaatttgttaaaagttttggtgcaaattcaggttataatgctcaaagattatctgcaatgggaccattaccaagtggttgggaaatgagacttgcaaatacttcaagagtttattttgttgatcataatactaaaactacaacttgggatgatcctcgattaccttcttcattagatcaaaatgttcctcaatataaacgtgattttagaagaaaattagtttattttagatcacaacctgctttaagaattttaccaggtcaatgtcatattaaagttagaagagattgtttattggaagattcatttagagaagttatgagacaaactcctgaagatttaaagaaaagattaatgattaaatttgaaggtgaggaaggtttagattatggtggagtttcaagagaatttttccaacaattatcacatgaagtttttaatcctgcttatggtttatttaaatatgcttcaagtgataattatacattacaaattaatccaaattcaaatattaatccagaacatttaaattatttcaaatttgttggtagagttgtcggtttagcagttttccatcgtagattccttgatgcattcttcgtcggtgcaatgtataaaatgatgttaagaaagaaaattgttttacaagatcttgaaagtgttgattctgaaatgtttaaatcactgtgttggatgcttgaaaatgatataactgatattctatatgagtcattctcagttgaagaagatagatttggtgaaaaagttgtaatcgatttaaaaccaaatggtagaaatgttgaagttgataatgaaaataaacgtgaatttgttgaattaaagactgaatggattatttcaaaaccagttgaaggtcaattccgttcatttatggaaggttttaatgaattgattccacaagaattagttcaagttttcgatgaacgtgaattagaattattaattggtggtttagctgaaattgatgttgaagattggaaaaaacatacagattatagaggttatcaagaaagtgatgaagtaattcaatggttctggaaagcaattactgaatgggagagtgaacaacgtgcaagattattacaatttacaactggtacttcaagaattccagttaatggatttaaagatttacaaggttctgatggtccaagacgttttacaattgaaaaagctggtgaatgtgatcaattaccaaaatctcatacttgttttaatagagttgatctgccaccttataaagattatgatacattgaagaaaaaattaacaattgctgttgaaaatacaattggttttggtcaagaataatttaaaaaaatacaacccttttttttatataataaagttttttatattatactttttattataatattatagtatccttttaatgaacgacaaaaaaaaaatgatcttcaagtccattggtagttgaaagaaaagagttatttatgtaaaattaaaaaaataatagcaaatgcctgtcacccatgctgggagtcgaacccagaatcttttgattagaagtcaaacgcgttaaccattacgctacacgggcattgcttgtttttttgaccttcaaaagatttattaacacatattaattgaacacgtgatttttggatttttaaaaaataacattgaataaaataaaagttgtagtaaatggtttatttgtccataaaaagtataaaacttttttttaagtagctgggatgataaaaataaatttgttttttgtaaaacttagttgatttattgtaagaaaatacgttttttttaaaaaaagttcaaaaattagcatcttgtactgttaatagaccaaaataaagggtattagcaccaatgagatgtgatacgcatacaaataaagaatatcacttatatagttcaagaaaaagtgttaagtaataggtcaaaatagtatttgaaaattagagtaaaattatgatcagatctacagtactgaatttcgtttagttaaattaataaattgtttgtgttcttggagacactaaatcgtaggaatatagcgataaaatgtactatgatgcacaattaattattttgccccaacttaatttataatctgctatccaaggtaaatttatgcaaaacgctaaattcatttatgaatagatattagaatgtaaagttcaaagccagatcgtttaataaattgggaaaatattattattacacatcttgcactcaagatgatttgttaaatgaataaaggaagaaaaagaatgtagtgttgattggagaaagaattaaaattaccagacttacatgaaaaaaagttatcgcactgaaatatttatccaaaagggcaatcaaattatcagggtttcttcaacatttcgatgaggataagacgactaagtgaaacaatacatggtcgaattgatagtgaaatagtacttgaaggattaaatgatgtcgtatatgagataattaaaaatggaattgaagcaaaaagtgataacattagggttaatattcgaataaattatgttacttctgtgatagaaattgaatataaggataatggaacgggtattgatcctgaatcaatggaattgtttggacagagacattgttcatcaaaggatgagaaatgtcgaggagttgctgttaattccattatgaatattagtggatcaatgattataattagtagagttaaagaatataatagtggatttaaaatgatttttaatggaattcaaagaattggggatgttgttaagaatggagatgattcacttggtactagtttacgaattttaggtctctatgatagggttccgataagaaagaaaattgtatttgagaaattagataaaagatgggccaatgaaggttctttgattaaacaaagggtagttgaatgtttaatcgataatccatgcattgacgtggttgtaaataaatatgaatttagaggtaataaatggaagttgagtggtgtttgtagcaattctattaaaacaaaggagaaactaccatttcaccatcaaatgatgatgattaggaatgttttagataatgaattgttcaaaaactacgaaatttataaaataaagggtaaaggaatagaattgaaggttggaattggattagagactgttcaaaataaaaattatcaatttttgttttataatggggagaaagtaaacaatgaatatttgttaaaatttattagtaatgagttccaaaataattatgataaatggggagatgaattcaagagaggagaaaagagaatcagtatgtatggacatgcttattcagttaatgcaatttatttagctagttttaaaggttcagaggagaatattaatatagaatctgcgaaagggttattaagtaaagctattagagtttattttggagttatgaaagggaaaaagaggaaagaagaaaagttggtaaatggcaagatactcgatgataaagagagaaaaagagaagagaaagttctcaaaagtagaatgctagtttcacaaatagatctaatggaaatagaaggtagaatggggacaataaaaaatgaaggatcgttagagaatagggtaattgatatggatcaattacgaatgaaatgccatgattgtaatgaccatcaatcacaatcacattcacatgctgatgttcccttattgcaagaggaaactacttcgcaatatttcggaggagtgaaaatcatattgaatagagaagatataatgtatatggaagtgattggtcaatgtgataaaaagttcattatagtaaaacagaggaaaagtggtgatctctatgcaatggatcaacatgcatgtgatgaacggatacgagtggaagaaatgtacaaatcattagaggaaggtaaatcccctattgtagatatagtgccaccatatgagatacagtttaaacaggacgacctcttaaaagtggaaaggtcaatagaaaaaggtaacctatcaaaatggggtgttgaaatttcaataattgataataataataatgatgatgataataatgatgataattgcagggggcttattacagttaatagattaccatgggttacgcaccgccaccttggtgggaaaaatgatgcgatacgtattttacaacgtgggatttcagaggcggtgcaggagattaatattggtaaaatgcccctatttataagggaatgtgcaaaatcatgggcgtgtaggggtgcaattatgtttggagatgttataacaattgaagagcaacacaggatagtgaataaactagcggaatgtagactcccgtacgaatgtgctcatgggaggccatcgttgtatccattaggaaggatataaacaatagtaaatgaaaatctaaaatatattgattacagtggcgaggttaacatagaataaataaaaaataaataggtggagatgaaaaaaattgtatggagttgcatcatgtgctgcaaaattatctctattattctgagcttaccccatatctttatgtagatgttcatatctttcttttagttttagatacctttataacttccttttttagcaattgaacacatatatgacaagagacgtacagaatcattatctatttgaagtggccacagaggtggcaaatcgtgtggggggaatttattcagttttaaaatcgaaggctccggtcacagtggcagaatataaggataaatatattttacttggtccattgaattataattctgcatctgttgaagttgaagaattaccagttactaataaagcattaaagaaaacattagattcaatggaatcaagaggtattaaatatctttatggtagatggcttattgaaggtgctccaagagttatattatttgatattggctcagcagctcataatttaaatgaatggaaaactgatctttggaaaattgctgcaattccaactcctgaaaatgatactgaaactaatgatgctattttattaggttatttaactgcttggtttattggagaatttagttgtcatcaaactgaaaaggctattattttacatgctcatgaatggttagccggtgttgctcttactttatgtagacaacgtaaaattgattgttcaacaattttcactactcatgcaactcttttaggtagatatttatgtgctggctcagttgatttttataataatcttgataaatttgatgttgattatgaagctggtaaaagaggtatttatcatagatattgtattgaaagatcagcatgtcatgcagctgatgttttcactactgtttctcacattacagcttatgaaagtgaacatttattgaaaagaaaaccagatggagttttaccaaatggtttaaatgttgttaaatttcaagcagtacatgaatttcaaaatttacatgctgaaaagaaggaaaaaattaatgaatttattagaggtcatttctatggtaaattagattttgatttaaataatacattatacttctttattgcaggtagatatgaatttagaaataaaggtgttgattttttcattgaatcattagcaagattgaatcataaattaaaggaagctggctctaatttaacagttgttgcattcattattatgccagcaaaaaataattcctatacagttgaaactttgaaaggtcaagctgtcattagacaattagaaaatactgtcaaagatattcaagattcaatgaatcaaagattattaaattggtgccaagatcctcatcattttaatgattcaaataagactgcattacctaatttagatgatattttaaaatcaagtgatagagttttattgaagagaagaatgattgcaatgaaaagagaatcatcacctgcaattgtaacccataatatggttgatgatgcaaatgatccaattttaaatcaaattagaagttgtagattatttaatgcaaaggaagatagagttaagattattttccatccagaatttctcaattcatcaaatcctgttttaccaattgattatgatgaatttgttagaggttgtcatttaggtgttttcccaagttattatgaaccatggggttatacacctgcagaatgtacagtcatgggtattccatcaattacaactaatttatcaggttttggttgttatatggaagatttgattgaaaatagtaaagattatggtatttatattattgatagaagaatgaaatcagttgatgaatcaattaatcaattagctgatcaaatgtatgaatttgcacaaaagacaagaagacaaagaattaatcaaagaaatcgtgttgaaagattaagtgatttattagattggaaaagactgggattagaatatgttaaagctagaatattatcattaaagagagcataccctgatggttttaataataattcatcatcaaatccttttgatattgatgaaaaaattaaaattacaagacctttaagtgtaccaggttcaccaagagattcaaaattaggttcaatgacaccaggtgatttaggtactttacaagaaaataatgatactgaatatcttaattggtcactgaaagatgatgatgaggatgtcacattaagaggtgcaagtgtcgtaccaagtgacttagaagatgacgagtagttgtttataataatattagatgcataatacaatcgttaagttaaccactgcataacataaaattatataaaagtttaaccgaagttgtataattaaattaagtgcttatcaaacttagctttttatcgtcagatcgttgctttattgaaaaatggagaaatgatttcttatctgcaacttcatactcttttctttttttttgtctttcattgaataatgtctaattacgttgttattggagcaggtgttattggtataaccaatgcacatgagattttaaaggcaaatcctaataataaggtaacaattgttgctcaacatttcccaacagattttgaatttaaaaatatctatacctctccaatcgcaggtgctaattgggaatcttttgcaaaattagatgatacattcgttcaagaaattgatacaattggttatcgtaaattttatgatttaattagaagcagaccagaagctggtgttactaaacgtttaaatagtgttttagtaactcatgaaaagtttagattagatggtggtgtaaagaaattaccttggtttgccagtggtgagttcagtaaagagatcaaatttagagaatataatgatggtgaatttgacaaggagaaatttgtttatggttttgaatttgatggtatggttatcagaacaacatattatttatctttcttaattaatgaatgttggagaatgtcaggtgcagctgaaggtgaaaatgcaagattctctatcaagagaggtactgtttcggaagttagagatgcattccaattatcaaattggaatagaaaactcgattatgttatcaattgtactggtttactttcaagaaatttactggatattgatatcaaagaaagagagaaaatgtacccagttcgtggttgtgtttatgttgttaaaaacaatgttggaattaagaaagtgactgttgttgaaatagcagaaaaagatgaagggttgtacattatgcctagaagagaaggtgaattaattattggtggttgtttccaagttggtaatgaagataaaattgttgatgatgcattaagtgatagaatattaagtagatgtaaacaatatttaccacaatacaattgggataatttagaaattgttcgtaaacaagttggctttagaccttttagaaaaggcggttatcgtattgaaagagaaggtcgtattattcattgttatggaatgggtggtgctggttaccaatcaagttggggttgtgctcaacgagttcaagatttgattttatgcaagagtaaattataatcatcgaaatcattattaatatttatatctagtctaattatatcttatatacattatttcattatttaaacatagagttgtaatcattttttgataaacttatctttgaaattgactgtttacgaactgaaattaatccaagttctctcatatgaggtgtttgttccgtagtatttgttaataaaaggttaccttggtcatctaaagctagtaatattccaacgagtcgtcgaccatcagtggtatctacgatatattgtctagatatgaggtcctctggttgcattgtagaaagaaggttggaagaggaatttttttcaagtttttgtcacgattcaataaaatttattattttgttggattacctgttgtttcgacattgcttctctcattctagcaagacaacacatcaaacaaatacaatgtctgtaacagaacatgatcatgatcactcatctatattgagagtttccggagactccttggaaagcatcactttacgttcagatttagcagcccgctcttcattcctagtagggacgctattagaaggagttggtgttatagaaccatcaccaagcggaagtacaactattgaactaagtgatgttatacaaacaggaatttcagatacagagtatttagagcaatggaaggagagattagagaaggaagttgatgaatgtgagaaacaacaattagtgcagaaagtaactgttgataaaaccactgagttattacaacagatggactcacaacctttaagaaatatagaggatgttcaaaaagagttgaaaagattggaatccttaatgtaataggttgttgtataatagttaaatatacggttagggtgcatgtataatatattgtgattatatttttagtacaaaatttgtgtatggatataatttattcatagtttaaaccttttagatatactagtatcatttatgtatatactatatacaatataataagttatgttagaaggaaaaggaaaaggaaagaaacataacagaaaccggaaaaaacggtcataaaattggtaaaatgaccataaaacatgccaataaagtgacttatcgctctttaatataaagataagagccattatctgtttccacctttcctttctcttcatttaactaacatctttattaaacaacaataccacaatgacgtacgtatatatacaacgacactctaactcacgaatgatatactaactgaaatgtaatatagctcacagcgaagaatagaactggacgtaaggaacttactaatgagcgattttagagcctccttagttaatgataacattagagaattagcagtttgccttgaaggaccaaaagattcattatatgaaggtggtgtatggaaaattcatgttgaaatacctgatcaatatccatataaatctccatcaatcggatttgaaactaaaatattccatcctaatattgatgaacaatcgggctctgtctgtttagatgtcattaatcaaacatggtctccaatgtttacaatgattcacatatttgaaactttcatacctcaattgctaaactatcctaatgcttcagaccctcttaatggtgatgcaagctctttataccttaataatagaaagctttatgaggaaaaagttaaatcttatgttcaaaaatatgcaaatagatcagaagtactacataaatttaatgtagaaatgggattagatgatgtagaaggtggtgaactacgagcagggtcacggaatacttactccgaaatggatccggatgatgatatgagcagtattgataacaatattaatgaaaaggaaaatatccctgaacaacgtataaataacaaggcgttttctccattaaaggaggttacctctcatacgatcaatatagcagcagactcagactccgatatagacatggatttataatcctatccttcttactgataataatagtaatagtagtagtttaaataccccatactaagagatttactgcgccaccaataatgcgcctcagttatttttatatttttaatttttataggtattttacacattgggatcaactcttctcaaattgtaggctttgaagttgtatatataaaccctttgatgtatagttttaaatcgtattaataataatataccgatactaccaatagctaatggaacgtcaaaagaaactgaatagaagagtatctttacaggctccattgaggaaaaataaactaaagttatctgatgatgtgatagagagtatagttactttccaaactcaattgtttcaaaataggatacagagtttaaataatgcttattctaatgatcctaagtttgaaagggatttaaagataataaatgattgggtttatatatcgtcaaatttatgttacttgatatcatcatacgattttgaacttattgaagaagttgtactacaatcatttacaatgttctatttgattatgaaatttaagctattaaaaataaatagttcattatgtacaaaggaagattttcaaaatataaacatcttatctcaaaagcttgtttcttttactactttatcaacttacagcgtgtacttttcacatatcaaacagatagtagataacaccgacaaactgtcaacaattgaagaaacattaaataatcataccaataaccttaccaataaccgcaaatctcttgatccaagagctaaacataactcattatcatctagtgacttgtacccaaatgaggataatgatgatgacgatgatgatgatgatgaacagtctgaagaagacctcgataatacatttcaagagtatataccgtcatctaaacctgttcagttaagtgacacagactccacttcatctgaagaatctaccaccataccaactgtggaagtaaaagatttagcatctttccaaaatgaactactcattataaatataaacgaccaaaagctacgttctagctctaagacaatcattacagtaccaccccaatatagttgataatagagagtttttaaaattaaatgttttaccatatttacaaaaggcagaataaaattgttatattttctaaaagtaattacatcactcatttagaaactgatttattcactctccttatctcattacacttcaataatgtttattggttaaagggaggttacactagttttgaaaaatattatattactcatagagcacccgctaaaacaccatttaaagcaaactcacctcctcctccaattccaatggcggaacctttgataccaataagcacatatacgaacaatcaatcatcaacaccaaacccttcattatcatcaactcaaacttcattacaacaaagtttacaacatcaattgaaaaatcaaatgaatcaatcaacattacctcgtcctttatctattccacctctagtcaaatcagtacaaactaataccacatcattatatcaactctcaagacttgactacaagccattagtgacattgcgtaacatgggatctacatgttatataaattctatgattcaatgtttgttttcaattaaaaagtttagagagttcttcatcaatgataggtttccttaaaaaatatttatttgatttgaataataaacaaaacattaaattaacttcaggagttcatgaattatttactaatttttataatatgtctccacataatgcttcacctcccgttaattgatatgacaagatttttatcagttgttgcgagattaaatcctcattataatataccaaactgaacaacaagatacatcacagtttttatactatataatcgatcaactacacaaggaattgaaattcaattttaataaagcagtcagtctgaatctgattaagtattccacatagctcgaagtgaaaagtataactcatggttacagaagagttacgaaaatgaaggattcagttttattcaaaatttatttaatatccaagaagaggtaaagatgagatgtcaaagatgtggctacgagagtgtaagatatgaaacttccatcatgatatatttatctattaagaacaagaaaacttcattagaggaaattatcaagagaaactttgtcccagaggagatgagtttagcactaggaaatgcatgggactgtgatggatgtaataaagctgaaaaagaacttgaagttttacaaagtaaactagagaaagatcatgatatatacatggcgcaacataaaatcaaagagctcaccgaaaaggaacgggaaaaggataaacctaaatccaaattcaaattcttcaagttaccaattcctagtagtaaacatgagggaacaccacaacctgatcacgattttgaaccatacccttacactattccattaaactgattttgagaagagagaatacaatagattagctgatatttttactagagagcgaaaggcatatcgtacagttgaattaatagaattaccagatgttttagtattctgtttatcattatttaatccatcacaacaaggcggaaaaattaatcttaaggatttgaaatttccagagatcttgaatatggatttaaagggacgtgaaaaagtttataaattaaattcatggatcgatcattggggaaattctattgattctggtcactacacagcaacggccacttataatgataatcaatggataacttttgatgatgatcattttaatggaccacatacaaagtttggtaattatgttcaagataataatgtttatttattattctatgaagcagttgtatagtcaactaattttatatttatatttcctaatacagtaataaacaaaagtgcgtgatggaaaaaatacatgtgcatttagaaatttaatgttttcatgataaaatttttttcaagttctttctatatatatcacttttcatcaagttttcattaaaataaacttctcttttaaccctaatgagcgtaataagtattaaaaatccattaaaatcaactgtgattgaagaaaatcatatcaatgaatctgatgacgaaaataacgatttaatgttagatgatgcgattgatgaagttttagatagtgcacagaagagatatatgaacttggagaattcaagtatagttaccccaggtgaattaataactgaagatgcaacatggatgagaggtcatgggacatattatcttgatgataaaacatattcatctgttgcaggtactatatcaaaagttaataaattattaagtgttataccgtttaatggacgttatagacctgaaactggtgatcacgttgttggtagaatcattggaattggtaataaacgttggagagttgatttaggatcagaacatgcaggtattttagtgttgggtgctgttaatttaccaggaggggtattgagaagaaaaagtgacagtgacgaattacaaatgagaagtattttaaaagaaggcgatttattaaattgtgaagtgcagagtacatttaatgatggatctgcaagtttacataccagatcattgaaatatgggaaattgagaaatggtatgtttgtgaaggttaattcatcattaattgttagaactaagaatcatttacatgaattaccaggaggtgtaagtgttatcattggtgttaatggatactgttggatttttaagacaaagaaccaagcatcaagtgtagcatctaataaagcagaaagtgagtttacttcagcatctaatggatattctgtcggaatgggaagtgtgagtataactagattagaggaagaaagttcatgggaaatttatagtgataagaatgataagattagttcaagtatcaaagaaacaatttcacgttacagatgttgtttacttgcgttaagttataataatatttctattaatgctcaaagattagtgaaagcttacgaaatcagtttgggttatggtgaaatcaataagttaattaacgaagatgttaagaagagtataggagaagacttgataaacagcgagaagatgagaggttagataattaaacaaattttataaactattttttgtagaatataagtagggtaagaagtatcattgattatagatttttttgagattgtctatttcatcagaaggaataacttcactaaacaaagagcccttagtattattgattaatcttttctcaaaatcagttcttgattttgtttgcatttgatcatgattgtaaagagaccatataaggtcctcttcaccgataacagtgtggtgatttccattatatacaatatcagcaacagtcatgtaggatatttgcagttaatcccccaacaatttctagtacgaacatcaaattcatgatcatcatgagtttcatcttcagatgcggatgataaatcttcaatttcttgtaaccaatttacttcatttttattgaacaaaggaaaaatatatgatcttaagttccatggtaaaccagcccattttgtcttaatatgactttgtttcatacattctttcagagtgaagttatttgatttaggttgtaagaaatcttttagaggaacgctgaatatacttgcagattcaccaggatttagtactaaactatgcaagcgacgttcagttttttcaacactttcatgccaattaatataaccaacacaaggtgcaacagcaaggaaagttctagctaagtaagcaggtaatacttttaattcgtccaacacaaaaccaaattctttgtgtaaaagagtattatgacgagatataccaatttcttcatccatttctcttctagcacattgaaattcactttctaatccattatcagctttaccaccaggaagagaaatatgacctgaaaaactttttaattgtcttgatctctttgttaatacaactcttaattcaccttcattacctaggaaaagtaataccattacggcagatcgacgtgcaacaggtactttgtgccaaacactaaattttgattgatttgcaaaatattttggtttaaaattaacaagatttgttaaatattttgattccatgttgtgccttataatcctatgttgatatgatgatttagggattggtggatcagggactgtattacataaagtatccttctcaacattagtgaacattggagcgacgcgtgccacagtttgtgacataaaggacgcgttttggtaaaaagtcttattttgaagttgtctccaaatttcagctttacatggaaaagtgttcaacatttgcgtcgtcgtctgttaacacaatagtttaccttcacttagtggaaacagtatttttaacattaagtaacgtgaatggtccctagtttggataagtgagaatgtctcttcttttaaaggggattctcccctctttttgttgatggtaggaaataagaaattaggacaacagaaggtggagaagtgagggaaaagtaaaattcgtatctcgcaaaattgaaggtgttatctttgcaaatattgcgaaaatgtacatctatttcagtaatcgtttctttttgtattatacacatgtgtaaaaagaaaagatataaacattactttaatagtaaataaatcgttaaatagtatattaatatgaaagtgatcaacactcttcaatcttttttttgtcttcattttgttcaacttgtgtacgtagaagtgctaattctttagtcatttcacttaaaacttctagtaattgaattgtatctttaccctgagcatcttgtcccaagatttgtctggttcctaaaacagtaacacaattttcaattctggtaattgtatgatctaagagcagtaacataaaaggttctgcagaagcaaatgtgtttcccatttttgcttcagcgtccctttgtacaccatcagaaaatatcttatattgtcccttccttgaattattgacagtttgtttgcacaaaaatgaatttattttctccaatctcaatgctatcttacgcaacaaccaaacagtttcactggtaataccaccaacaattaacttactttgaatagtattattgattttaccatcttccttagttatcatctttaatctagaacttaatgattttgggaatgtaacccacaaattttcaggtgtttctaaacctttcaatttctttgcaccaatattttccaaaacaatcccaatattatctaattgattcatttgattttcaatatctttacccctacttttatatgtatatgccttattgacatcaattttgttattcttaatcagttgatgaatcttctttactttattcaattcattataaaaatccgtacttagtgtaatttgaccaccatctgcaactgaactaactcttgacgcacgattaaccataggtccaaaataatccattctcttagtaataacatccatttcacagacaggagtcccccaatgaatacccattctaacagataatcctctaaaaattaaatttccttcattatccttaacttcaaaaccttgatcacttgaaataatttcagctggccattcatcagttgtcaataattgagtttgaacaatataacaccataataatgcagccgtcggtgttgggaaactgacaataaatgcatcaccttctgtcttaacttcataaccaccaataattcttaattgacgacgcataatagaattatgaactttaattgcagatctcatagcagctggataattatcccataataatgttgaattcttgatatcagtgaaaaccattgctaaatctccaattggaggctcaatttcatcatctaacttacgtaatgtagaatcttcaggttttgatgcattataatgtttttgtttagaagtaaattgtctcaatgataaaacaactgatgtaaccttagaatctttactaccataagaaatagcaaaatctcttaatttttcagcagcaccaattgggtttgatttttcttgtctaataatatcagcagctaattcaaaagaaatccttttccaaacttcatttgtacaaattgcaatcatttcctcatttctagttagtttaaatttatgaatacttggttttgcattaatatgtggcattaatttgaaaaatccaacagcacgagaaacgtttgaaacaccatctaaattaccatcagttgtaacataaccaccggaatcacgaattctatcatattcttttgttgcataaggttcatgtttagttgtaataacattgaattcaccatcagatttggttaaaatacccattatatcaccaacattagcaacataaacataatctttcctaatataaataattgttgcagaacaccctgataatccatcttcttctaatatcaatttatctgtagtttttgttctatgtgcagctgctgaactaaatgtagaagtttcatctttattgattaaaatactcatttcactgttcatagttaaaaatgcacctcttaaacaatcttcaacagtttttggatcattactattgataacagtttcacctaatgtttttagttcttcaattaaatgaatttcaaaagtttcttgaataatcttggaaattttatcaccaccattaggagtagaattaataccatcataaattgtaattaaaaattcatccggattaccacggaatttttcaataacaacatctcttgtggttaaggaatctgatgagcctaaactatctgaaataccataaccaaatttacctaattgtgaaactgtagatctaactctcataccaacactttgatcaggaacggaatccgtagtaatagtaacatccattaaacctaacatctttagtttcttaagtgttaaaaacgaatcaagtttctcaccagtttcttcatcgacactatgttgtggtttaatctccaatcttttattacctgagaagtttaaatatttcaagtttttattataacaccaattccaatcgtatgggatattaccaatattatatttcaattgattactaccaatatctaatgcatccaaagctttcaattttgataattctgcaggtaaagtaccaaatctattaccatttaaatgtaaaattttaatattttccaaatcatccaaatcttcaataggtaacgatgacaagaaattacccgataagtataaatttttcagctgcttgagagatgataaataaccagatggaatatcaaagaaatcattatatgataaattcaaacatgccagatttttaaataaggctaatgttggaaaaactgattctgaaagtttattgtcgcataaacataactctttaagtgaaaatgctaaacacaaattatctttgtcattcatattgaaagaaagtgtttcactaactcgtctatgtttcaatttattattttgaagattaataatttcatcttccccgagttcatcttctgatgcaatagcagtatctcccatatctgaatcatgtgttataatttcaatactgtcatcactattactactgtttgtattaacctctttaattttttccagttgcatggatgtactataactattgaataaattatctggaggctcagggaatacttccagtaaattagaggctaaatttaatacttctaaactaggcaagaaccaaattttttcattcactctaccaatattatttaagtgtaaatctaacacctttaatttttgtaatttgcaaatagaatccggtaaactcgtaatattgtttttgaaaactgagaaatgttgaacactcttcatcttactgattgaatcaggtaagacagtcaaatggttataatccaaagaaatcttttcaactgcaattaatttagatgtgaaagaacatgatgttaatttacccttggaaaaatcaaccaatttaagatttttcatatcacattcaaaatgaacatatgtcaatggattgatattcaactcaacttcaaataaagttggtgctcttgatctaaaaacagatattttattaccagttgctcttataacttccaattttggtgaatttttaagcgaatcaattgaagtgatagcattgaaacgtaaatcaactttaatcaaattttgtaaattttcaaaaaattcaggtaaatccccatgaattttattacctgcaatttgtaaagtctcaagatatttcagattagccatctcgggtggaaaggtacttattgaattatatgataaatctaaatttctcaaattatttaatttaaaaatttgtggaggaatagttttcaatctattggatcctaaattaagagtttgaagattatgtagcattgtaaatgtatctggtaaatgactaattctgttacaggcaatatttaatgataccaaagttgacaaaattgaaatttcaagtggtatggatttaatatagttgacttcaagatctaaatttgccaatctaggagcataaataactgcatatgggaaagtagggctaccacttcttgtaaatgaaagtgaggttaaatttctagaatcatgcataaaagtcagacgtgaattcaaatgatggattttgtgaaacatttaatgttattataggttcagcgtataaaaagtttggaatatcttgtaaattccagttatcaagattaacattttgagggttaatcattcttttcttttcttcactgattacttcaactcctttttcttcaactataaatttgaataaaaacttaaatccgttctttcaataaaatccagattatctctttcagtataaccatacaggaataacatttttctttgaatttttaatggttttctcttctaatgctaatgttcttgttaaaccaccacattttaaaaccattatatgatcttcctcagctcttaaaaatctttttcttcttaacatatccagtatgtttttacaagtactttcaagagtacaagataaaatagaagatttagtccctttaaagattctaacagatgatttagatgagccttgtaatgcattggaacctctctttgtcatttgtgaactagttaccaccggtgcttgtaatcttttattattattcatgcttggttttatagtctcagcagatttactagagctatctagttcattagtagattttgattttgaattggcagatggtttattcaaatcagaagaattacttctttcattattatcaaaaccatttaaatctactgatgaatcacttttcaatgtacgaggagttatttcagataaagattttggtattttagaatttgagtttgaattagagacaggtgaactattcattagagacagaacttgaaatatctgaatctaaatttgacatttgagtttcatttttttcctgctgttcgagctcatcaattttaactttccaactttcaggaggtctccaaaaagttttttcatcatttgaagtcattggaatacttgtaactgagccaacacgagtcattgcatgtgcatttgtaattgcagaaagatcattggatgtatcttcatcaattaaagatataccatatgagcgagcaaaactgtttgtagcactcattggggttgacattaaaagtggacttgaaggttttctgcttgaggaactaccatttgatccactaaagctttctgtgtgatgattatcattattatgatgtaaatgcccatcaaaatgaccatgtgggaaatgtatactaccaactgattttttcttctcacttgaatgtacagaatttctatattgcgataaaggttgaattgaaacacctttttcagatggttttctagctttaacagatgaagttgaagtagctcgatttttcccatgatccatagtaaatatttgtgcagcctgtgcaggtaaggaactcgattttttatctttctccatgggtgggttattattaatattgaattcaagacttttatgcgtttcactttctcttcttgatggtaagaatctatttaacaaatttgctcttttacttgtctttttacctgattttgatgatctatccagagataaaaaatttgaataagatttagatgttttcactgaagtttcagaaggatttctacccttttcagaaccagaactagtatttgtggtcagtggagttcctctatcaggtaaattgctatttgtactactattatcagtatttatattattattactattattatcactcgaataagataagttaccaattgcattcttaaaacgagaaggatttcttgaagagcttggagatgttgaagaatttgaaccgtcagaattttgtcttccttgtttagttttgtccgatgaactggacgaatctgcataaattgtctcattcccctgttcttccatatatttggagttgaattggggtttcatattgtcagaataatgtgaagggttcgacattgtcttgattccctctaatgtaagcttcaattcactttactgagccaataatattattcccagtgaaatattctaactctacctctaactctaacaattaaattcatgcatctcaatgtatgcacaatagaaaaagtgctagtaaaaaagacataaattaagggaaagtttggtgtacgggagagggatttttaattttttttttctagacaccccccgaaagagggaattattttaatattagtattagtatatcaaattaattatccactgggagtttataccacttgatgatctttaagacttaagggcaaagatcttctgtatatatcaattaactcatataatcttatataatactgcactcagcctagtgctttattggagaaatcatttatctataacttacttatccagggaactccgcagtgatgctgagtagtcttattggatctcggaagtctactcaggggcaaacccgtccgcaagtgggacctcaaagacaaagtgaaactttcaaattctataatacaaataattcattatctgatgattatcaaataaaatcaaatgataaacaacattcaggtattaatggaataaatgatatgagtggagtggaacaggcaaatataaatttatcccccttatatggtaacgataatgttccaccttccactaattttaaaatatcagataaaatatcatctattagattggtagttgtacaggatgctggaattagaaggaaacaaccattgtttgattctgcactaccatgtaacaataatatttcaaaaatgaatcaaaaattaaacaagaatatctatcattcaattaatgaattatcattatttatgtttggatgttacggtataccaatatcagagaataatactacaactaaaattcattatttaccctctctttcaaatttacattcttcaattttaataactagattgttttcacttgattcaactttcaaatttaaacctcatgcaattgtaactgaaacaaatgaatgggaaactcatcccatactagacgcagatgaacttccatttttacaaaatgcttcaagattttcaataggtatgataatcccagttcattcatcaatagaatcagttactgaggaaataactaataattgggttagtatttcagaatctttgaaagaaatacaagatctaatatcatctaaactggaatatcaatacaaaactaatcaaaataaattaagacagttacaaaagcaaaataatcaaattgcaaatagtaatgcccaatctttacactcaaataaattaagtttttcaatatattctttacaaactgaaattgaaattttccaaaatttagcttcattcctaagatctctgatatctttagtagaaacaccaagacttttcattgacttgaaacattctaatcaatctttaataaactgggcatcaaacttatcactttggaaagaattaaaggatggacgaaataatgatcatttccaggaaaatataaatactgataatgcttcagaaacatttttacacccatcatttacaaatcatccttcatatgtaccacaagttaaatttctagcttcattattggcattacttattccatatcagagttgtttatttaatgattcggggtcatttttgaacgaaaatttgttttccaatataagaattataataggaacaggaaatccagtagtctctgagaagcttatttttattatttccgggattattggatatgatacattttctaagatttacgataactatgaaactattttgaatcataaagtcaatgaaatagttaaaactagtactaatgatagtgctagctcttccgttcattctaatttacccaatttatactccaattcaaaccttaactcatctcaacatccacaaagatcattaacaccattatcatactatccatcatctgccatagccactaccaatgttttacaaaattcacgttcattttcacaaacttcatcagcatcgtcatcttcttcacccagaactcctttgccatttcaacgccaagaaacaaattatagcatgccaattccaatatctcaagaaatgaaagaaaaatctccaagtgttcaaactaggtcaggctctctgtatataaattctttaggttcaagcgttgaaaaaaatggtatcaaatcaacacctttgtgtatttcacaatcaccaagcatagcaactgtgtcagccagtatcaatacccaaagaataaataccccactaagccgaacttcatcatatgcatcattacaatgtttatcaaccagttatggcgcaaatgttccaaatagtattggctcaaatacaccttcaagttcatggaggaataattttggttccttcatggatagatggaaaaattcgatcacaccatcaccaactacttcacatttttcacaattatctcaacctgtaacacaattcacaagacaagattcaatatcacctagtgtaagcgaatataatgaatatccttggtttggtaagcgagtgccaaattctccaacaatgtcctcctcttcatcatttatctcaagtaataacaataataccaccaatagattcacaatcaagaataacccccatttaagctcgtatattgctgaaagtaaaaaacttgatattaaaagaacatcaacaaaattaattataccttatgcatcaaaactatcagaaagtatcaaaaatgaaataaataatataatggatggtaactttgaatataaattagatgataatgttatgaaatctgttgttgaagtgtcattagatgatacaataatgaattctgatatttcatgtgtaaatgaatttgagttaccacttttgacaggttatgttccacagttccgttcggaatttcatttacaatcttgcaatagtaaacaattattagaatcaacactcgttgaaactatgagacacgatttaaataatttgaaatgtgagcatagtgaaatattttttattaatttaggaatgcataggatcacccattttgaaatggatgttaagggaaaagtcactaacgatgtaaaatcagatgaacacagtaattactcgcaattagaatataatagaagcgagacagaaaagccaatcaaatcaaatttgactaaatatatggaatgtgctaagaatcttcatcaaactacattattgacttcctcaaagtcattgaataatgatttaactcaagaaaaatttaatagagaacatgatattgaggaaagagtcgaaaaagttgatcaaatcttagaaaagattgtatggacaatcacaaactttttttatgagattaataaaaatgaatgcagtagcgatgatgatgatgacgatgaagatgaaacattgaataaaaacagcgatggagaagtagatgaggatagattaaagagtaaagctgatttagagaatgaatgctgcaatgaaatcagatctttgatctccaaaatgttggaaattaaatgaccaaaaaaaatttaatacaaacctgatataaaaaataatattctaataatttgtaaatcacaagtatacaactaataattgaggtatgataaaaatttgattcctatcattgatagaaatcatcataagcatcaaaatcactatcttcactatcatcaagattggattgattactataatcagattcttgagtactataaccattttcttgttcaaatttacgtattgcttcttcataagcctgtggcttatatttatgtaaaactttcctgtactcaagatacaatgattcattcagtttgaaaggtttaatatcactgaataaatgttgtccttttaaatgaggaattccacaatgtctacagaaaggtgatgtttcatgatattggtgaaattgaggtggtgaatggatattcataaccctgttattggaattcagcttttttgatgatttgaaaatagacctatttttgtcatttttttcaaaagatttcggatttgaagaattggatttcttggacttttctttgttttggaacatttttcaactatttgattttcattattgtaaatcttttcagttttacctatttgagaggatttattgttaatttcgtcaatattagataaggtaaactgtctcagtgattcatttaatgatgaatctaacttactcgagttttcatttttatcatttatgaaagaagaatgcatgtctttcaacaaatcttcagagctcagatttttttgtataatactatgtgttacattgaaactcatatttttcttatcgacattagcaagatccatcatgatgtattcactattacttctaatatattccgcaacatctaaaggtcgtatttgaagaccagatttggccatatttcccagtatctcatcgatattgtattgtatctttgaataattagtagaaagtaaagcaattaataaacgtgtattgatattttcgtgtaataatatcgtttgttcaggagttctgttactttcgttatagtattcagttatttcatccaagttctcttgatatttgattagtgagcctgaaaatgtattctcaattgttatgttcttaaataaatcttttgcaaatgtattttcaattgatccagcttgtgtgttttccatagaacgaagaatcttcagatattcacacaatgaagatgattttgaaccactattatccttcgtgcacgttttaaagagaagattaaaattcaaaaactctttatgcgtaacaaaatgcaataatatttcagaagcagtttcataataagttattaataagttttttggcaatttgaacttattagcccatttaccaatatttgttctatctggcttctcttcggtgaaaagtcgtgtacaatcacttggaaataagtcataatttttctctatcactttcatcaatttccaaacataaatagatggatgaattttattacaattgattctatctatccttaatttttgaaattcttcagatgtaaatatattcctcaattgttctctaagcttaaaatccactgtcatagcaaaagttgccttctccagactacttgattcttcattactgacatacagttcttttctactcatttgattgaatttttattaattatttaaaagcaatgagtagcagtatataaatacgggaggagactcttatccaactataatccaaataagttaacaccatcacagagaatgaatcatcaaggaacaatcgaagaaccgttttgttatgatttcattgagaaattcattcttcgctattgttcagacaaatttcatcgatgatctattaatgattctatatctgattctatttcattatgttattatacaacttataaacttataaattagctctttcaggaggtgaaatctcatgaatattaacagtcttactatccaaaccttcaatattagcaacacctaatggtgtgataaatatagtttgtctcttaggattttctgcaaccttatttaaaattagtttcaacgcaattcttctattaacattatccatgaaaacatcaaactcatctaaacctctaattctagaatgcattggaccccaaatcgcaaataagaacgcaatttgtccatatgatttttcaccacctgaaaatgattcaactgatcttaatggacctgtatcttttgtagcaacttttaatgttaaggtacctttcttgatattgaattcaattctacctctaaaacgacgaattttcaatgcagatataaagacggattcaacttcttggaatgtaaggtatgtggtttgtaatagattattcaatctttcctccaatgccttatataaattattgtaaagatttatggattctgtgaatttattttcaacggccttcagttccttgtttgcatttaataagtttatttctgctctttccttcgttataccttgtctttcttcaatttgttttaagtatctattaaccatatctatttctctatcaatagattcatttgttgtgtttttagttaaatttgcttcttctaatgtacaaaattccaatgcttgtgattttaaagtttcaatattttcagtgatttgctcaatataattttctaattttttgagatcactttctagtttaacattattattttcaagatttctaatattgtttttatgaaattcgatgttggagttgaacccattataatcgtcaaccattttagagtataattttttagcactttgatagtctgcagatatagtttcaaaaactgatctctgttcatttaaagttgtaatagattttgcttgttcagtttgtagtggttctaattctaaggcttgtaatgaaatttcagattcaagctcacttttttgattcatcaatgtatccagtttagaagtaccaactgccattttttcaagtttatcatttgttttatctatagattgcgtaaattccttagctttgaatttcaagtcgtccaatactcgttgtaattctctacacttatttcttgcattttgttttttatcgtttatttctctttccgtttgttctcgtgccttttttaattcattcaaatctctctcgtatctcattactaccgaatcaccttccatttttaaccttgcattactaaatttggtatttacggtaataggatcagattgataaacaccattcttcttgtatattctaagaacattactatccacaaaacaaatcgcagatgagattaaattatgagtatcttcatccaacacacgttgagcttccgctctggttggaactaacactgtattatgaattttcattgaatcaaccaaaaagcattgtaaatttttatcagcaatatctaggacatctaggatggttggatacttagttcgtgggatatagttagtgaaatcaaaaacttcaggttgtctaacagtaatttcactccctgtattatgaaatttaaccttttgactaattttttgtgcatcttgatgattagttactaaaaatgagcacaattgtttttgcaacagtgtttctaaaacactactccaaggttgaccagcttttttcaattgaatatgaagtccaagtggtccaagaacagctccttgaaatctttgtgattgaagatcttttgataaacttgttaaaggtttactaagtaaattttctgctttgttagaatcttcattatattttgcctctcttattttattttccaaatctcttatattgttaataatttcatatagagagtttttattttgcttttcaatttcattcaattcaattttagccatttcatagtctgaagaaactttagatctttcagtattcaaagcagcaagtttttgggtttgattatcaacaaaagatttcaatttttcaacattttcttcattggagccttcaattctttccttttcccttgcaattttttgatctaaatgattcaaggttcttttattatcagaaattttttgtttcacggttgaaattttacgttctatatcattaatttcttccttgacttcttgaattatacttttacaactagatctttcagcttcacaaaatttatatttttcagagtaagtatccagctcaccactttcaaattcagctttctttttcataattttatcaacttcttctttaattgaatctttctttatattattttgttccatttcagttttcttttgattaaataatgcttgagcagattttctcttatcttcacattctctatgttctaaccatgcttttttaccaatcagtaactctttcttcgctgtatattcatcagaatctttgaaagaattccaaactttcttagcatcttggaatttttgctttaattcggtataaacaccttgatttgaatctaaaatacttttaatttcacttgcattagtttcaatatctttaatattatcaaaagattctttaagtcttgtaccagccataaaactattgaatttatctttatcagttgaatgagcaaggaaagttttagcttcagtttgagttaaaattgtcattggattagcaattgtaataccaaaatattcaaggattctatcaacagttttcttagttgttgaaactgttttttgatgttcatttttaacaatcaatgaatgaggacgatcatttctcaaaactctttcaacaataatctttgaaccaaattcttcaggtttataagcttctgaaccttcgtttttaattgtaactacagctcttgcaacatttttaccatgtttaattaaattcttcaaagaattaccacgatcagtatcacttgcctttgcacccaatgcaactgaaataccagttaaaattgccgatttaccagaaccatttctaccgataataaaattagtttgtggaccaaaattaagtgaaaatgcttcatgacacataaaattaaataattctaatttttcaataataccagcctctgatggagaatcatcatcttgagttaaagatcctgatgcaaatggtgcctgtgtcattttaccaactgatcttctccttcttttctgtgaccatctttgatcaatttgagtcattacttctgaaacattcatttctccagagtcaactgcacgtaattcaactgcagatctttcattatcatctaacaacgcgttagccttcaattttttagaggtaattacttcattatctgatccagtatcacgttctaactgtctcttagcactagtcattgtatgtatgtgatgataagtgtttcaacagcttaaaaaattcccactaaagatcaaagattaaagatttagactcccatcaggaaggctctctcttttcaaattcaaataattggcaaattcaaaaatatttttttacgcgtcatattgaaaaaaaagcacggtcgatgcgactgtattttttactaagggttcattatgcatgatcttttaccgttattgatcgatttgatcaacatgttaataatgataattcggtttaagagtcatttttatatatttgtttacagagtaagagagactagaacttcttaactgaatttttggattagtagctattgataattatgtctaaatcatctattgctttgaatgccaaagcagcagctgatggattgattgatttaacatcgcttgatgtaaaatggttaccacgttggaaacaaaaatgtaacggtaaatttattaatccacgtcgtttagtaaatgaatcaaataatccaaaggataaaaaaaaaatctactctttaacaatgttcccatatccttcaggtagtttacatatgggacatttaagagtttattcaattagtgatgttttagcaagatattatcgtttaaataattatgatttaattcatccaatgggttgggatgcatttggtttaccagcagaaaatgcagctgttgaaagaggtgaaaatcctgagacttggactaaattaaatattcaaaaaatgaaacaacaaatgcaattaatgttaactgattatgattgggataaagaaatttcaacttgtgatccagaatattataaatggactcaaaaaatctttttagaattatataaacatggtttagcttatagaaaaaaggcagaaatcaactgggatccaatagataaaacagttttagctaatgaacaagttgattcagagggtagatcatggagatcaggtgcaattgttgaaaagaaacttttagaacaatggtttttaggtataactaaatatgctaaatcattgaataaagatctagaattattagaagattggccaagtaaagttaaagcaatgcaaaaaaattggcttggtgaatcaaatggttgtgaaattaaatttgaagttgaatctgatgataaatcaattaaactaccattgaatattttagatgtttttcacaactagacctgaaactattttcagtgttcaatttttatcattatcatttgatcatccaattactcaactttatgctaaaaatgatattaaactaaaagcatttattgatagattaaataaagaagatgaatcagaaaaatcaaaggaaggttaccaattagatggtttatatgtgattaatccattagatgctaatattaaattacctgtatttgttgcaccttacgttcttggaacttatggtagtggagcagttcatgggatgtccggcacatgatattcgtgattttgaattttggagaaataatatgggatcagaatgcctgcccttatatatacagttgatcctatcaatgaaactgaatgctattattgaaggttctgaaccatatgttttaaaagaagggtaaaatgaatattaattctaaaatcttagaaggcttatcagttgaagatgcaaggaagaaagttaccgaagaattgaaattgatcagtatgggagattataaaacaaattatagaattagagattggttaatttcaagacaacgttattggggtgcaccaattccaatgattcattgtgattcatgtggtgtcgtacctgttcctgatgaagatttacctgttaaattacctcatgttgatgcacttttaggtagaggtggttcaccattagcacaaattgaagaatttgttaattgtgaatgtccacaatgtaaaaagccagcaaagagagatactgatacaatggatacatttatggattcttcatggtatatgtttagatttatcgattcaaagaatgacaaggaaattttctctaaagaattagctactaaatacatgccagttgatcaatatataggaggtgttgaacatgcaattttacatttactttattcaagatttataagtaaatttttcaatgatattggattatatgataataaagaaatgaaaggtgaaccttttaaacaattaatcactcaaggtatggttcatggtaaaacattcgttaaccctaaaactggtaaatttttaaaacctgatgaatataaagtaactgaaacaggtgatgcaattataactgcaactggtgaaattgcaggtatttcatatgaaaaaatgtccaaatctaagtataatggtgctgatcctgctgaatgtatcaataaacacggtgcagatgcaactagagcgcatgttcttttccaagctccaattaatgatattttagattgggaagaaagtaagattgttggtgtagagagatggttgaaaaaagttattaaattaggtgttgaaattgcaaataaatcagaaactggtaatattattaagcctaatacaattgttgcaccgaattactgaaaatgataaatcacttcataatgaattgaataaatttgaaattggaattaatgaatcattccaaaaaaagtccttcattcaatacattaattgcatactacatgaaatatacaaattctttaattgactgcaatgaaattagaagatatcacgcaatcatatattgaatctaaatatttagatttattaatttacatgtcaccagttacaccagctacatgtgaggaatcatttgaattatttaattatagagttgaaaatgatgaatccaaagaacaatttttattagaagctgaatggccaaaacttcaaaatgcagttgaagctgaggtaccatataatattgttgttaatggtaaaatgaagtttgttttcaaggcagatgaagcatttatgactaaaactgttgaagaatgtcatgaaattttacttgctactgaagacggtaagaaacatttagaaggtgaaaagattaagaaaataatagtgaagaagggtactgttgtctttatgacctgagaagactaagaagagtaaagcgtctaagagtaagaaataggcgtaatttgtatatagttattcatgtaaatagttgtaaaaacagttaatgattcaaaatgaaaagataaacttgcggagtcagataatcggatcgggttaatttgagcgagtgctttcaaaattttgatattttcataagaaaataatatttaactgataacagtctccttgtgggcagtgtatagtttctgtttaaccttttttttaatatctcttcattggtgactgcagtggcaaagatagtaagcttttactagtataagaatgtcagtacagttggtgataccgaaaaatgtatccaatttgagaaatagggtaaagtttttatcaagtttgttagtcaacccgaaattttacagatatattaacaatgtgctatcagatccttcaggttttggatagatcattaggaactctatgttattttatgctgtttgtaagtgcaattattaaaagatatcctaaactgaaaaaagtgtttttaaaagtattcaataaggtaatgatcgtttataaacaattattgaatcgaattatatatcaaaaccaaaatcttgaaaagaatattgaggtaaaggaaactaatgataaggtagaatcactggatggttcatctgataaagaattatcaccattcttagagagtctttataatatgacaaagaatttttcaggttatatatcagatattcgaatatttaatagaggattctcagtccctggatcaattgctgatttacttgaagcatcacaattgctaaaagatggtgattatttaaattatttttcaacagtatgtatatcattatatcaaccatgtgaaacaattgcatttatgatggatcataattggttgttacctgataggaaagcaaatgatccagattggtggtatattatatcaactaaattttggtttgtttgggttgttgcagaatttacacaattaggatatgaacttttcataacaaacggtggtaaaaatataagtaagaatgaatttattgaatttactgaacatttagctacattaccattatgtgttcattggagttcagaaaatggttggttagatgatttacttgttggattttttgcaactatcgcaggtggattatctacaatagacacatggaaagatattattcaaaaaatgagtagtgaaatcaattaattaatttaatatactttttttattacttttctgtagtgtaaacacttacataaggttatttattatctataaagtagcttagattgtacgaacttttaaagcagaagggaaaagaagtgaaaatgaatttgaagatgaatgtgattgtgaatgagaagttgaaatgaagaaaaaaaaatgtcaaatgtagtgttaaaaagtttaactgtaaatattagaaatgagcaaaaaaagtatttgaataatattagagttttagattagaaaaacatttaaacggaagaagtccattaattcttttgattatttttaaagtattcccttaaaaactgtaaatgtggtaaaattttagaattacatgcttgatcgatatttagtttattaatatattgaagttttttagctgaagcaatcatattttgatgaatatgtgatgaagcaatattattaggttctaaatcatttggagtataattaacacataataattgtgacataatttcccaaatttgtaattcaacatcataatctgcatctaaactcttcaatgaaactatatgattatttctttcatcaaatgaatcttttaaaacctcaattgggaaatattttggatttgataaatgtaaaaacataaaatcatcacattgtaaatttcttaaattaactctatcaccgtaatattcatttccaatcattggattacattgtgccataccagttgattggaatccttcttcattaaaatatccaataaatgaaagtgattgtctaacttgataaactggtttatctaatgaatacgcggctaaaatataagtgtctttatcaccttcacctgcactaccttgtgatatcaaaggataataataattagcaccataaatattaatatataatgctaataataaagtatctgcatgaatttttttattaactaataacataccactttcagttgaaggatttgggaatgcaccaggtagatcatgaatatcataattatcattttctacatcagtaattgacgaataatcaacattaatatggaataagtcaaacatgaaaggattagttgttctaatccaagtatcaggccataaaattaattgatatttttgataaatatcccaattaaataattcatcgggatttttaattaaaatattatcaacatctaataataaaatattttcaaattctgaagctaacattgctaataatttatattcataatttttcaatttaaagaaaggttgtacatatcttaatggtaattctttataacctaaaacacattttgcattaacatattgtaacattgtttcacaaaaattataatcataatcttgaattgtcggtatgaaaacttcaactggtaattttgaaccaatttgtcttaattgatgtatacttaataatgctaaccaagaaaacttcccaccaccaaccattactatacctttactattaatgattttagaatcttcattaccgaaaattgataaatttaaattattcaaacctatttgataatgatccaatgattcaaataattgtaatttttgattattatttaagggtactaaactagataggaattttttattaaatttcacgttatcttgtaaaaatcttttaacatcggggttttcttcattataatttttcaaactttgaaattgtggtttactctctattaataatttgaaaagatcagaataaataccatattgatcctttgaatcattcaattcatttataattttctgttgaacaattaaatttttattatgttcacttctaacaattgaagataatgaatcagatatattcaatgaactaaaatcaaagaaatataaaactgttaaatttaaaataaatataacaatcactgcaatgaaaagttttactcgtatcctagcaaaacggagtatcctcataatgtattagatataagtatagagaattcaatcactgctgagagtatatatgtgcaatagataataacagtaatcgatcaaacttaaaagaaactacagataaatatgttaaacattaaaataaaataaactttatactttaaaccattgtccatatcccagcacaaagaaactcatgatggatttctcgctattaaactaaaatattttttttttcgtgtttcctttccatttcacttgctctgggcccttttatcgtgtaggttatcgtagtgtttgtgtatagttatgtagttatatttatataatgtataatacaaagaaaagtatgcaatgaatgaatatgtaaaatgaataaaaataaaaataaaaataaaaatgtagttgtaattgtaattgtaattgtaattgtccttaacctgatattataaagaaaaaaaaagaatgctatttaattaattaatataatcaattgatctatataatcacagaaatttgcgtgaaaagaaatgtttagtgttcccttcagatacaggttcagcatctgattttactgcattattgaaaggactggtattatcataagtttcttgttttgaaatattttcaatatcttgattcatcatatcatcacttggataagaatttttatattcattattatcattaatgtattcattatcattactatcattatctctattaatataagtttgtacataaccaccataacttgaagcttttaaatcccaagaaataataaacatcattgtaccataataataaactaaagaccattccataattgctgaatacccccaatattttgaccaacgaccttctgaatttgccttacccataaaagcaccataacaaacaactaaaacaattgcaatacaagtccaaataattttaacaattgcactatttctaaaatgattaattttataatgtttataatgaatcaaaaatgctaaactatgagcaactaaataacaaaacacgaaaataacgaataaaataacgaaaactgaatgaactcttgaatattgccaattatcctttaaacatgaaaccattaaaatacataaacatgcaattataattaaagcaattgctaaagcatgaacagcggttacaaaccaatggaaaattggtgggaaataatttctttcaggagttctaagataataatcttcaataactgaccaaacaaggaaaatacccataattgctgaaccaacaatgaaaattggttgtaaatcagttgcagcgatatttgaaagataaacaatataatgaggcatttcataatgatcagtatctaaaattggtctacctttagcaaaccaacaaatcattaaagcaactaacattgcccaccaaccaaataatgaaatcattggtagtatccaagcatattgaggtttaatattgggtagagtaagtgatcctatcttcattattctataaactacttactattatcaaatgaacaaaacaagaaaagatggataaatttaaaaataaacatgcatatataagatggactggaaaatttaaaaatatcatggaaagggggcttgtaaggcataaaatattctttttttcagggacgatacgtcgtctgggaatttaccagtttttcatctatttgattatctatacatgaatagaatggattattaatatatagcactaatagtttatattagaataacaagggatatatacaatgctggtaggaagattgtcaaagtgttctagaaatatactcaagtctagttttgcatcatctcatttaagatcatttgcaactcattcaaaatcaacaactattcaacctgattcctatgaatcaaataagaaaactgaaacaaataaattagagaaatctttagctaaattttgggaaaaagttactattggtaattcaaatgatggttcttatactattgaattagatggtaaatctattaaaactcctttaggttttgaaatgaaaattccaaagaataagaaaactttagctttcctattagctaatgaatggaaatctttaccaagtttacaaattaaacctttcttagttccattaacttcattaactgctagatgtattgatttaaatgaagctcaaattactaatgatgatgaaattaaaactaaaattggtgatttatcaacaattaaaaatttattattaagatatttagatactgatacaatgttagtattttcaccaagggaagattgtgatggtgaattaagaaaagaacaagaaaaatgttatagacctttaattgaagatatggaaaaatttttcactaaattctctgatgatggtaaacctgttaaacttacttatttagattgtgatactgatggtttaattggtaatcaacaaactaaacatactcatattgctgtattaaattatttaaatagtttatcaacttgggatttagttgcattagagaaagcagttcttgtaggtaaatccttccttgctggtgtaacaattttaagaaatgctgattataatgataaatttaatttaacaattgatgaattagctagattagtatctttagaaactgtcttacaaactttaagatggggtgaagttgaagatactcatgacgttgataaagttgatataagaagaaatttagcaagtgttgcaattgttgctcataattcaaaacctgaatagagattaaatcctttagtgtatttatatatatataaataagttcctgtaaataaaataatatattcacatttttatactaattaacaactagattaactgtgtttgttttctagtatacattatacattactacacatattaaaattaataaatacattcatgaaataaattaacatcactgacagaatcaaaatttaaaatataatcattggaatcagcttcattttcatttctcttaattaatacctctctaaattgaatcttatcaatttgctctttacaaacatttaattcaatattaccaaattcaaaacctgttaaatcaatacatattgaattattacccttattttcaacacttaaaacacatctattcaaatcaataactacatcattttcaatcttctttaatgatgcaacacttgtcaaatgtttagttgcataactttgttcttcatattgaaattcattaccttttccattatttacattatcattttcaatttcactctcaattgatgaaaaactatccatctttggtaacatcattttatcagattgataacttacctctgaatcataactttcattattattaactaataatgaatcaattatatcaggattaactaaaacattactaataatacgcatatcttgtctattacttggttttatcataattgttaatttattacctttataactctcagttgttgcatgaatatcaattatattaaatgtacaatctgtattttcattaatttttatcaataagattggtttattagaatctgaatttgtatctaatgatgaaattgttttatctgatatagattttatcattgtattgtaaaatcctaaataaaatttatcatctaaacaatgtaagattatactagtttctctactttttgtccatgaatttgatgtccataatgaaattttggcaattgatatagatttggagacacaattaggatttgaaattatacttaaaatttcatcatttatacttgaagaaattgaatgtaatgatttagttggtgaaacttcttttggttttaagtcgggtatattattaattgtttgtgatttgattttattattagatgatatggatgatgatgatttcttctttgaaagtaaattagagaatgatccaaataatgatttcttacgttttggattttcagtacttgttgtatcaatactattttgatatttacttaaatcaagagttggctttcttgtaattgtctttttaatttcagtttctttaacttcagtaggttttggaataatacttttaacaggggttggtaatctgtttattggaggtaaagaaatattatcattttcactaacattataagattgttgttcaatattttccctttcatcatcagaaacttcatcatttgcagtttgaaccagtatttctgtgaaaaagtctctttttgtagttgaatcaattaaatcgggtatattagtttgtttatttagttttggaatttcaggtgtgaattcaatctttggtgatggtaattttgattcaacttcaactggttcttcaactggttctttaagtggttctttaattagtgtttcaactgattcttcaacttttggaaccattatacctaaaccaaaagaaactgttgaatgacttactggagtttctaattttgggaagaaatcatttaatattgaatttaatctctcattttgtgaatcaaatgtaaaacataattgtattttggaagtgtgaattgaatgattgaataaaagtgaagttaaattattttgaatattacctttatgaaattgaaattccgatttttttattggtgtgaaaactaatgttttaccgaaactatccttttgaacgagtaagatatattctgaggatgttataaataattctaatttcataaaatttaatgatgcactttcatttatgtttaaataatgtaaatcaacaatgaaaacttcagaattgtttaaatcattttgatttaattgaacaccaacatttttcagagatacaatatcctttgcattagtaaaattaatcaatgaatcagcatcttgctttttcgttttcatcaatttttctacaattttctaaacatttagtaagtttgaaaataataacttccatatttgaaataatttcactagaatttggtctttcatcaattgtaattaatatatcttttaaattcttaaagaaagtatttaaatatctaactctaatcattggtcttcttctaattttaacttcagtttttgcttgtaaaacatcaagtttataaaattttaagtattcattcataattaattacaacatcctttccccaatttgaaagttgataaactaaatcatcaaaatctgaattattcgaaataatttgaattaatgatgtatgtttgacaatcatttgttgaacaatatttaataattcattatttttctcctgtcttatagataccatttcattagttatatcatctaatgaagaatcaaaataattattatagacaggatcaaaatctagtaaaattttttctaatattttcaattcaattaagtattcattctctgatttgttataattagttaataataaagtcaatttatcttgttcgtactggtatggatgattatttcccatttgattgatacttgaagatgaatcaacagcttcttgaattgagaaaagtggagttgctgaatatgaacgtgattttttcattgcttaacggtgacttttttttcaataattaagtattagagaacaaaagaagtagagtacacagggaagaactaaagtatagcaagagttcttaattatattatattaattaattaattaaatatcaatcatctaataatccagtcaattcatgtacctgtcaaaacgcgtttcaccagatgaaacgtaaataaataaataaataaataacgcgttgttttgtttacctaatcattaatactttcactgtaattctaaaagcgcgtctactgctaaacctgcatcaaatgaacattctcttacaacatctctgataaggttggaatccattgatggaaacattgaaataagtccgttgataatctcttccttggcattattatctctcgcctctgctaatgattcattctgtgcttgaagtaattgttcctcggcctctctacgtcgtgttgattgtcttgtagaattattatcattattattattattattattattattattattattattattattattattattattattatgttcttctgtatcagcatcaatactgttgatattgtttataatactattgattgaattcgataatgattgtttaactatttctgcactctttgttaatacatcagatggtgatggtgaaatacctgatattgatgaatctcccccttgttgttgttgtaatttttcaaatcgtattttagatttattcatttcatcttgaaattcttcatcgttaattgtaagttgatctctatttaaactaatgataaaattacatgcaatttgcattgtactaacataatatgatgtttcaccaatcaaaaattcctcatttctaaatctttcaatatattgaagattagaatataaatgtttaacctttgaatgaattaaaatataaattaataagtggtacaaatgaatccgcattttcctctgttttctcttgttgtctaattaatccaaatattagtttagatgaattaagtatacaaacaattttatcccttggtgatttaaattcatcaatcttacttaattcctttgacgccagcgttatgaatttagaatcaattttaacattaatatttaaatcaagatgtttaaattctatccaatcatagagataagtatttgtaagatattttctatccataattttatcatgtttatgagaatctgttaatttgataaatgacatacatggactgaacacaactgaataaacttttgtcatgatcaatttttctaaaccttctttacaattattaattttaatctcatcattattaagttcattaaatggttcaaattgtattaatttattaaataaaaaatcttcaaattctttaatcagtttgacttgttcattaactgtccaaattctttgaccaaattgtctaataaatgattttaaatatttatgaattggttcacaatcttttgatttaaattgtactaaaaattcttgaaaatcaaatgatctttgtttacttaaattagatggtggatttggtatgaatttaattgaattactacgttgctttactagttgaactctttcttcaactttagagtcattgatattattattagttcatcatcaatgttatcatttcatttcatcatcatgatcgttatcaattaaattaatttttaaggggttttcactaatatcagttacttttctttgataatttgatcttattaacttcattttcaacttctttattaatgatatcttcatttttattttcaatttcattatcagatacatttgtttcattattaatatcatcaagtgtttcgttaattaataattcatcattatcctgggtattattttgtaataaatcattcttatcttgttctttcatacaagctttttcttcagaaatactcatttcatcaggaatgatgattcatctttagtttcagctggtgcttgcaatttatttgaagtactagtttcaacttgtttctctagctcttcttttcttcttcttctcttcttcttctcttcttcttcttcttctcttcttcttcttccgcttcgtcatcttcatcacttgattcatttaacaacattcctttaccatttgtttcttgtttatttatatcaattatgctactatcagttctagcatctaataaagttttcagagttggacctttcattgttgggatatttgatgtgatatcagttgtagcagttgaaactggagtattttgttctgctgtatcgtttactatttcatcaatattgtcttcattatcttgattatcttcttcttcttcttctagattttcttttatattatcttcattttccttattaattaacaaagattcaatacttttctgtaatgtaccatgttcctcttcttcctcctcaatttcattaatttccgaattttcaacttcatgttcattaacaaaagatacaggtttactctttacttccgataaaccaactgttggtttcgcattagttaatgaaggtaatacgaatccattcaatgacattgttgtttgtctaaaagaaagaatgattataatagagcctttaaattatgcagcaaggattattatcattcaagttgaaaaagttaaatttctcaatctgtgagatttaaagggaatacaccagccacaattattggttatttatatatacgtgttctgttctgtattggatctataaagacaatatataactgatgaaatacagtattccttactgttttattaacattatcaagattaatcaattgtgaagataatttagaaatagaggatagtgaaattatttgtcctgatagtaatccattaaattgttatccaaaattatttgaatccaagtattgaatggaaagaagttaaagagggtcaaattataccagttggattagatattagattagatttagataatttaaaaaaaatggcgaaattaacagaaaagaaagatagtaataaaaatcatgaaattgttgtttcaaaacataataataaaggagaatttgattcattaattggatttattgaaggatttgttgaattaacatattctaggacaagttttattataattaaagatcattttgaacaattaattgaatggtcatctgatattgaaactggagttgaaatttcacatcatttccaatcattattgaaaataacaggattgtataacaaaaagggagaagctaatattgaagataaatttttccttggtgatgaacaatattcgattattcaagatatgacatatatgatattatcatcaacatttagaaacaatattgaagctcaaaaagttttactcgaatatttgaataaacctgaagaatttttattaaaattagtagaatatgatgataataatttaataattaaacgtaaattaggattacttggatcattaattaataataatttatttgatgaatatgttaagaaagctagaattgaaaaatcattgattatgttgtatagtaaagttgatgattatagtgttaaggaaaggattatgaatttacttgaggatatgaagaatagagaggaagaggatgatgctaaagatgaacatggtgatgatggtaatagtgatagtagtgatgtaattgatagtaaatatgcagatatagtacaaagatcaattgtaagtattgaaccaagtagtgaaagtgaagaatataaagaaattctagacattttacataatatgagggatgggaatggtaaattcccaattaaaaatgaatttttagattggttagataaattaattaatcataagaaatcaatcggtgataaggaagttaataagataattgaattaagacatcaagtatttggtaatcgacttggttctcgtagggattatgacgatgagttataagatagggtagatgttgtgaacacgctataagcggtataaacgatattaaacggtatgataatattataaattataaatattataaattaataataattatagtgtataaaacaatgctataataaaaaatatgcaggtacggtgagaatatatggagatagacaatagaaacgggagttttgagcgtgttttatattgctatgatgtaatcagttaattattaaattttcttgtttatataacggtacctgattcctagtttatgaaaaattacaatcttactgctttgtttctgctttctcttatcttattctaatcttatcctgaaaagacaaacaaatttaaataacaataaagaataatgacaacaaatttttatacggatttagtaccaattacaacagatattcaaccaactattagtgtttcagatactattaacactatatcaagtgaaattacaaatacattaacaactcacagaaccagtatagaggataatgataatgatatatcaataataacagatacaagatcatcagtatatgatgtactgacgacaagtagtgtaactacaacatcatcattatctacagatcaattatcaagtacagcacataaagaagttagttcgaataatggtaatggtaataaggctaataattataaaaagaatacactagtatggggtatactaggtacatcacttttatattcattcattttataacttcattttataactttatatacttttagatacttttagataccacatgttcttttaaataagcttaaatacctattactaattaataataacattacacgtgaccaccaagagggtaacataccctaaaagaaaaccctcacttaattttaaaaaaacccgcgcaatgaaaaaaggaaaaagtgtaaaaaaaaaatttcacttacttaatcatacgcactataaatacttagcagtatctctatttgaaatttttcaccaatcttgttattcttattttcttttaacaaccacagatattataacaatggctccaattgtatgtatacatttctatttactaactaattagttattacattatcaagtctttaatagaataccagttatttaatatttaatatacttttcttattatctaactgttgtttattttaaagccatgtattatattctcgttatttatgagtttattctactattctgtgtctaaatccttattaataagggtttattctgcagtaggtatttaatttattcatttgtattctctattatcgtatcttgtaaattgtaattattattattagttaaaggcaggacatctttactaactctttctcctttcttccttaacttaattttacagactaagaaaacttcaaacgttactaaaactttcactgttgattgtgcaaccccaactgaaaacggtgttttcgatccagaatcctacgttaaatatttagttgaacacattaaaattgaaggtcacgttggtcaattaaacgaacaaattaccgtctcaactgaaggtactaaagttgtcgttgtttcttcaactaaattctctggtaaatacttaaaatacttaacaaagagatacttaaagaagaaccaaattagagattggattagattcatctctgttaagaagaacgaatataaattacaattctactctacttcagttgatgaagaagatgaagatgaagaataattctgatggtctttattttattataattataattacaatatagtttataagttattgtcttaatttaaataaatacttgtattcttttctaaatataccctcccatactgttacaataacaataatcataatcataatcatattaatcattacgtaatttttaatcttaatgtttatcactttttatcccatttacctcaagtttgatctgattttatactataagtcatcgtatctttcttttagcaaacaacacaaatatgaacattgaagatggtttccacaatgatcatatgttaagtactgattcaattcaaaataaaccaaaactacgagatagtaataatcatttttatagtaattcaaaactatctcatcatattccccaatctcaattaatgtctgatccaatgttagataaattctctaaaggttataataatgatgattcattcgatattgataatgattataaaaataatattgatagttcagatatggataacactctaaatgatagtaatttatcagcaaataatgataatttcattgaatatcaattaaataaaccaactaatttaaataaagaatttattgaagaaattaatcatgattttaaacaaatcaagaaagattatattaagaatgaatacaataatagtaataataacataattgacgatgtacagcctgataacgtaaatacatcatcaattttacctacaaaggaattggatataaatgatgatgatgattcaatggatgaatggaaagaaattgatactcaactaaattgtgatgatatttataataataaaggtgaaaaaatagaatttgttcatagtaaagatgatttaacacttgcaaatactgctgtaagttcaactaatttacattctcagaaaaaatcaaatttacaaaaaatttcaaaagttggctcaagtattggtaaaaagacagttcaaataactgctggtgttaaattaggtaaagatgaaaaggaaattaaattaagggaaaaatatcaaaaagctcatttaattaattcagataatacaatgcaaggttatactagaattgatgaagaaagacaagcagttaaatttaataaaatggacaaaaaatttgatttccttttccaaaatgaaaataataatttaagaaaattacacaataataataataatagtactaatgtatccagtgcctcaattgattcggtatctaagataactgatgattttatgaataatgataattttgatgaaattttcaataatcaaggtcgtgatgaaaatgaattgaatccttcaattcaaatgatgtcaacaaaatcaatgttaacagattctcaaaaaattgcttatgcttcattagttaaattaataattgttcaattgaatactgatttaatcaaaattagaggttccaattcaacgaaaatattgaaaaaattatcagtttctcatacttcatttatgaggtggtcaatgaatataatgaatgaattatataaacatttagatattaaaaataaagatgaaattaatatgattgaaactttaagttgtcatggtgttgaaagtaatgatttagcaaaatcttttgaaaaaaatgtttatattgaaaatcaccttagtgatacaaaaaaagaggataacgagaaagatgaattaaatttaatcaatatagatgaaaaacaaatacatgatgaaaaaacaattgaaattgatattaaatggacattaatttgtgatttatttttaatcttattagaagcatcagtctatgattcaagaagtcgtactttattaattaattttgctaatttaattggtattgaaacaattgaaatttatcaatttgagagacgtataactgactcattagaaattgatgaagcttttgaaattttaaataataatttaacttgggatgaatctgatattctaaaagaacataaaagaaaggcaaaaaattctaaaattgttaaaattgcattagcaactgccgccggtggattagttattggacttagtgcaggtgcacttgccccagttattggtgcaggtttagctgcaggtttaacaactgttggtataacaggtacaagtggatttttagcaggtgcaggtggtacagcaatcattacaacaactggtgtgatgtcaggtatgagagctggtaaaaatgcaatgtcaaatagagtaggatctgttaaaacattcgaatttataccattacataataatagaagagttaatttaattataacagtttcaggttggatgtcaggtacaatggatgatattagattaccattttcaacagttgatcaagttatgggagatttatattcattattatgggaacctgaaatgttgacaagtatgggtcaaacaattaatattttagcaaatgaaattttaactcaaagtattcaacaaattttaggttcgactttattaattactttaatggcaggattacaattacctatgatgttatcaaaattgggttatttattagataatccatggaataattcattagatcgtgcatggaggagtggtaaagttttagctgatacattaagaagaaataaattaggggttagaccaatcacattagttggatttagtttaggtgcaagattaatttatagttgtttattaagtttagctaaaagtggagattttggtatagttgaaaatgtttatttatttggttcacctattgtaattcatgatgatgaaatggcacaagttagaagtgttgtaagtggtagatttgtcaatggttatatgaaacaagattggattttaggctatttatttagagctacatctggtggtttacgttcgattgcaggattatcaccaattaattcagaggatttcaatgttgaaaattttaactgttctgaatttgttaaaggtcatatgcaatatagggaagcaatgccaaaattattgaaggaaataggatgggaagttttagatgatcaatttgtggaaattgaacaaccaaatactagtgaagaggagagacaacgtaaattattaagtgattttgagaaggcacaaaatactaaaaagaagaaaacttggtataataaaatttttggtagaaagaataaagaatggtgggaaatgtatgaagagggtgaaaaggagaagaaagagaaggaaaagggaggttgtcgtgaaggtgaaggctgatagtactgatggtaatgatggtaattttgatcttgaagcgttaaaggaagaaattgctaatattgaaaaagaagcacagaaaattgaaaaggagaagaacgatgaagaagaagtggttgttgtgaaggttgataaagttgtagaagatacggaaaagacacctaaaatagaaaaggaatcctgttgaaaatgagattattccaaaaacacaacagaatgaagataaaatttcatcttacaccaaattctaataaaccaacagatgcgccaatagaagttaaaaagatacgtaaacgtcaaagtttgatcaaacttgttgaatcaaaggatgattttaaaaagggtgataattttgataaaacggatactctagatattaatcaaaataaacctcaattaaaatcattcaggataagttccaatacatcacgtaaatcaagtttcaataaatcacctgttgttaacttgaatattttccaaccacctgaggttataacaacaaatgtagttaaggaaagcgatgtaaaggacgatccaaatgatgagatgaaggatgctttaaaggatgatgtaaaagatacaaagttagatttgaaggattttgactttggagaatatgaggaacctaataataatggaagtattcaaataatgtttgatgatgacattgatgagattgaaagaaagattaagatggagcaaagtaatcatgcaggttttggacctgttacaggtataaattatgatgatgaggaggaattcccacaagatgaaagtcatgtacaatttagttttgaataactgacatgtgtgtgttttttttcaagtaaaatgttaatataaatttataaagaaaacaaaagtataatgtaatagaagatatatataaattaaatagttagaattaaatttattatataattaaatttataaaaagacttcagcattaatttcaacaactgataaagcaaatggaatttcaaagttagctaaaacttcagggtgtaaaacacctaaatgaccaattttaattgcttcagtatcaggttttgctctgaaataaattgctgcacctctacctgggaagaacattttcttttcatcatctgcaactgtccagaaacctcttttgtttgagttttgttcattagtttctaaccaaggaacacgcattgtttgcataattttagttaataaaccttgaataaattcaaaacctgattttttaccagcataagcagctgaccaatttctttgatttcttgcacctctttcatcagttggaactttataaactatatcaccagtttcgaagactttaattggtaatgaatgatttttattttctttgatagttttcaaaatacctggaattaatgaagttctaacaacttgatattcgatagtttttggattttctaattgaactgctaatgaatcatcattatctaataagaatttaaagttttcatcatgtgaacataaagttaatggcataacttctaaccaacttgcttgagcagttgcagtacgtaagatatctgaaactttattaattggtaatggataagcagttgttgcaacagattttggataagttttgactaaattatcataaccataagcgacagcacaatcttccataacatcacaagcgtgtaatacatcaggtctagttattgggattttaacattaatagttttggaatcatcagattcggaagatgcatctaatgacatttttgataataaatcacagatttcattatttgataattcaagagctaaaattgaattaatatattgggtttcaacatctaaggatcttttagttaaatttggaacaattcttgattcattattatgttctgaaatgatttcaacaggttcaactgagaatggtacttcacaatatcttgaaaacattgcaattaattgattaataacaatttcaactttagttctatcagtacctgtaacatctaagaaaacatttttagtatcaagagtaatttttgaagaatttgaattaataattggaggcattgaacaaacatttctatttgaatctaaaataactgggaaaacaggtgaattttcaattatatgtaaatatttaccaatatttttatcagatttataaaattccattaattctaaaccactcatttcctttgtttgatttaatggagcaaatttaatttcttcaggttttaaagcttcataagtgaaaggaccattaattttatctaaatcatgagtacccattgcaactaaagttctacctctacataaattactatgtaatttatcttgtaaagcaataaatgaatcataagatctttgagtaaatttaatatttctaagtattgcacttgcagcataaggtctaattgataaagttgattctttaattgtaagagttgtctttggagtttcaggtattaattgataatttggttctttaactctacctaaatattgattaagagcttgtgcaataccttcaatacaaagcatatcatatctatttgcaccaatttcaattttaagttgaggtctttcatcagtacctttaacatcatcagttgtatcttcatctaattcgaataccaaattggaaacataattcatcgaattcttcagtagtgtaattacgaccaagaagatcgaataaatcttgtttatcaacagcaacggtaggcatatctgacggggttggttgtataaagaagattatctaagacataaataattaattcatgaactgttggaaaatggaaaaatcaataggaaattgaaatttactggaaaaaaaaatatctgcgtcggtcggtcggtcggtcggtctgtttcccattgaggggggggttttacccggaaaatagagggcgatttcttattatcagtacataattgatgcatgttgtatagttgatgatctgctagatattattattatatgttgaatcttatcttatcttatcttcaaacagactaaacaacaagatgtcagctaataagggtaaagcatttgataagtcaatgaaattgttaatggtgggagacagtggagttggtaaatcatgtcttttattaagatttgttgatgataaatttaatccatcatttattacaacaattgggattgattttaaaattaagacaattgatcaagatggtcgtaaaattaaattacaaatttgggatactgcaggtcaagaaagatttagaactattacaactgcttattatagaggtgcaatgggtattataattgtttatgatgtaacagatcataatacttttgatagagttgaaacttggtataaaactgttcaacaacatgctaaagatgatgctcaagttataattgttggtaataaatgtgatgaagaagattctcgtatggtaagtactcaagaaggtgaagaattagcaaatcgtttaaatgtaccatttattgaagcaagtgctaaaaatggtcttaatgtaagtgaagttttctataaattatcaaaattaattttagagaaaagtggtgatgatttccaatcaaatggtgataatggtgataatgttgatattaaaaatggtaatagtaaatcatcttcaggttcagcttcaaattgttgttagttagttttctaattgatgaacaacaataataataattagtataatttatattccctttcttacttacttacttacttacttaattacttacttatataatcttcgtcgtaatactgtatttatttttcttcaataattaataaggttcaataaggtagtatagctagtacctttacaattacaactacaatttataaaacagatagatgtgcgcagtatggttgtttcccaaacgataactgtccagggacattcgcagagaataggaatataccgccacaaatgatttcataccttaacaatggcgaactcgattgtaactatacattaaatgtataactacaagaattcaaaccatctaatataaaacaatttgatcaatttacagcccctcaatcgagcaataccctgcaccatagaattggcgatttcaatttatcctcatcaacaaatcgttaaattcggacagggataaacatgaaaatctagtgctagcttcacgaggattgacatgcaattacaccaataggatagataataatccaataaatgactatatcatcctatcatctgtattgaaggctgattgtttaaaagaaagtaagtgaaaagagtgaaaaatagtgaaaaaaaaattttaatgtgggaaaaatctctttcttttatagtgagcgggtcttacttatttttcaaattatggcacttttaagggttttatacaatactaatgtctataaattttattcaggattacatctcttaatggtagcaccaaataactggatattgatactggaattcttagcatcacccgtagactcgatctgttcaaatggtctctctgtaaatttaaccgctattgaatctttatcaatctgttcattccatgattgttgaataatataatattcgtgttccttctctggaatagtatctgtccaatcaaacattgttaataaacttcgtaaattgttattcaaagttggtggtttaacattgagaatatttgcaattgatgtatatcttgatgcttgttgtgcattattcatattcattgatttattattattattattattattaggtgttggggcacttgaatttcctctatttatccataatccgggactactagcattggatggtttattaacactactcagtcctgaaagtgatgcattattggtactattaacaagattgttattgttattgttattgttattattattaatactattactcatcttcatttgaacttgttcatttctctccgtaattaattcagatatacttaccttaatagaaattaaaacatcatataataaatttttcagtttgggattcttctgaatcactttatgattgaacattttcattaaattattaatcaaaacatctttttgtagattaactgatcttttcaatattaattcaactaaaaactccctatgaagtaatataatccttgcaatcatcttaattccaaattctaaatctttactaatacctaaattatattgtctctttcttttaccatatgctattccattgaatatatgaattaatttatctaatactgatgttaatgaaaatacaagtccatcacttaactttaacactttttccttcttatttaatggtatattaattatatcattttcaggtgatttaaaaatctctgtttttccatttatacctaatattggtattttattcataccatcaacttctttatcaattccattaacatttactgttatactctgtttttgttcttcattctctaatttttcaacttcatcatcactataatcattttgtttacaaacactccataaaatacaacttaataattttgtaacatcaataccattatcaatcaataatttggggaaattttcactatttaaatacatttcctcacatccactcaatatattttccttgcatttgataggtacgtaaacaaacaactctccaattagtttatcatattgattagcatattttttatgaccttctctcattatattttcaatcaaagtattataaaagacaccattagcacgttcatttttcatctgaactctaagataataatcaaaataaaactgtaaaataggtaaattaaaataatctaattcattgacaattgtaatttcattgataatatcgtgaactatttcatcatttaaaatatcattaaatataaatttattgaaattttcatgattaatcatatcaatatccttcaatatatggaaatatttaatgaaaagcttacttttatttgttgcaaattcccaaaatcttgaaataacttctttattaacaaatctaacttccttgttaatatttattggattctcattcaatacttcattaactactttaatatcttgtggtgtttccacaccaacattaagtgatggtgtatctgtattactattagttaaatccagattaagattcatattcatgttaatattcatattcatgttcatgctcatgctcatattattcagttctatacttccggtattaatttcattgatataattacttgtacatattctagtgaatatttgatgatatttttcacaattattcattatgtattgaaatttcaaatatttaaatataaatatttcataacttttattaccaatcacatattcgttattattctctgatatgattgaatagttttcaacggtttcaacttcagttgcacttgagtctttatcaattctaattccaatagaagtgttagcaaattgtccattatcaaaaaacaaatcgtaaaacaattttacttcatcaaatgagttatcaaaaattccagggtcttctttttcagtttcaaatattataattatatcactaatatcaacaaatttataaattagtaattgttgaattatctttaaattactttcatattcaatttggaaagtcgatttaacggatcttttcaagtaatcaaataaatatttcctaaattctaattctttccatttttgtaaacttttcaaatatttaataattatcccaatcttactataattttcacctgttttaacaacattaataaatttcatcaaacagatcatcataaaatgtgaaaattcaaatgtattaactaatttctcatatattggaacttcaataatattcatttcttccttagttataaaaaattcatcactctcttccatatcactacttacaatatcattaaacttctcaatatgaattaatgttggaatattggctttttgaatacatttagaaatttcatatttgctatttttttcaaacatcctcttgatcaaaactattgaatactcccacatactccacttcatattgtaaattgtagattccaataagtttttattgattacaatcatttgaattaacaatataatacatctgttatctatgttgattaatctatcttcactattcaaaacttctaataatatagtcaaaaatctacttaaaccaatttgatgaagttcaaatagttcataaataatactcagcttattttctgtaatataaatttctttagttttggaacttccaataatattttcaaatctcttgatagctgcttcaccagtttcaaaatgtttattttgttcagtaggatcattataacaaaagaaaaagtctttcatgtgtaataatgataaagagctataatcatcatcctttgaatataaagtatctaatatttgtaaatttcctaaacttgaataatcgatatcattatcaacaattctccaattagtagaatccattaatctacccaatatacttttcaaatttgtatcttcctttttaggtaattgattaagtattaaaatatgaatataacaagatctatcaggttcggataaataaataaccccggaagcaattaatcttcttaaatatgaagagataatgaatagtttgatatttgataatctattaatcaaatttaaaaagctaattatatcataattattaccatctttggttctaacattattatagttcaagatttcagacatcaaaaatataaaatcaattaccttattttctaaatcagccttaaattgtttaaattttttgggtttagtttgaattaaatcagatattttgaattgtaaaactgaacagattaatgtaatcctctgaaaattaatatctttagtaaaattatttctaatcccccattggaaaatgaaatgtaaataagttttccaataatcactattatcttcaaaaattatcttactcaatgattgaatagattcatcctgaaaattgttcagtttatttaagaccaatgatatcttatcatacactagcccctcagaagtcttcgaattcagcatagatttgagaatcggtactgatggtgtatttgaagaatgtgatgatgatgttaaatttggtataaatgaaggtgatggagaaattggtgaaaatgtagaattgactaatcttgtactaacatttgatgttaaaggacgatcaaattcatcattgtttagagaattgtttctatatgaaataagtttaaattgttcactgacaggaggtaaatccatatctaataattttctcaaaaaaggtttgaatcgattccaattatttggtattatgaaaatatcagagttaaaatagaataaatatttgatcatttcttgaaatatattaacaagtctgtttactattgaatcaaattttgtatttttcttgaattggctactatgaaataataataataacattgattcacttaactcttttgttaaatagtcatatttaatgattttgaaccaaaacattttgattattgtatgatgtatcaataatggacgtatatctgaaattgaattgattttattgactgttgacgaggtataacgaacaatccaagttaagaacgtagttctattcattaaattttcagtatataagttaacaatcaattcgattgaataatttactcttggtctccaatttcttttctcagaatgttgagtaaaacaactttcaatgattgattcaaaaaatgcagttatctgttcggtccattcaactatccatttgttaacatttaaagttgttgatatattattattttttcttcttaattgacgttgttcacttgttgaaatacatttaattaaccaaattgctctatgtatgggtatattatgaaataaacattgttcaagtaaaaatctatttcttaaaccatgtggtattgctcttgataattcctttaatggtatattaggatttgctaatttttttaaccatgtttcctttttatgctctgttaaagttacccttgcaggtggtttataaacactattagatttaattccattaaatattttcctttgatgcattgcatcaatgaaaacttgtcccattatatttaatctactttgatttattaaattattgtctttatttgattcattgtcgaatagagttgataataaatgccttcctgactgatcctcatatttaacaaattggggttcaacataacctttctgtaaattattttccattatttgatcatccttcttcgtttgtttccatacatggaaatctggatatatcttttcctcctctatatcactttgcattgaagaatcaattattccagcattatttcccttatcttgatcgtttgagtcccaattcaatggataaactccattaggatatggaacttcaccatcatcagcatttaaaactaccggaacggatgacatggcgtattttctctgttccttgctttaaccttcccttataatcaccctgagccagcagctattgaataattcctgctgtggagggaaactactataagaagtcggattacgtaactgcatattgaaaattaacgtgacaccttcaaatttaaaaccgtaacgattattatcggatcaatgataagagttttaatggagtttacctagatagagtacactcttggtagatcagagatatacatatgaatattaggaaacctttgcagtcagaggtacagctgaaaaatcctaaattgttgaatgtggcgtttaatcaagacaattcctgttttgcggtatgttcagagacaggatttaaagtatttgcctcatatccaatggaattgaagatggagagagatttctcaataacaccagataagaagaatgtaattgataatgaaagacatgtggaaactaaattccctgtgaaaagtataaatcggtaatgagtttaccgtgaattggaattattaagatgttatataaaactaattacattgcattagtaggaggtggtaaaaaacctaaatttccaattaataaagtttacatctgggatgattttaaacaaaaggaatcgatagttcttgaatttaatacaccagttctaaatgttcatctctctaggaaacatatttttattattttaaagaatttttcattggtttattcatttaaatcaaaacctgaacttctctactcatttgaaacaattaataatgatttcggagtgagtgaaattgttgtctatgagaattcttccatatttgtatttcctggaagagttgttggtcaattgcatgttgttgatattaataacacaaacactgtgatggctaataagaataatattgataatggagatgatggtgatgataataataaagataatgaacgatagtgataaaagcaaaaatgatttcacgatagtaaccaatgaacgagataaagaaaataagagtattgggttaataaaggcacacaagaatccaattagatcagtttgcttatcaagtaatggtaaaatggttgcaagtgcatcaaaccaaggcacaattattcgaatacatgatacaaagacatgttcattgttgtatgagtttagaagaggtgttgacagtgctattgtcactagcatgaaattttcacctaataatgaaaaactagctgttcttcagtgataaacatacacttacatgtttattatatccaacctcctgatgcagaaaatggtggtggtggtggtaatgatgatgatgataatggtaatggtaaccctaacacaaagcatattcttaaaaatattccattgtttaccaaatatttcaggagtacatggagttatgtttctaaagatgttggacataagactgataattttcatgatattggagaacttgggtggtcagatgataattctatcataattatttggaagtttaaaggtatatgggagaaatatgatattattttaaatacattgcaattggataatagtaaagattcaaataaatggaaaatcgtcaaagaaggttggcgtagtgtataagctaaagttgttattagtttttattccttgtataatattagaattgttttttatagctttgattgaaaccaatattgcattgaaatgtcagcactaacgtgaaatatcaggacccattaatttgacaatacaattggttatataacaactaagtcctgcagattgaaattgacttcaaaactttatctgcaaaatgatgatcaacaacgtaaactattattcgagatagtttataatctgtgtaattggaagtaagacatagtatattagctataagattaatagtttgtgaataaacatctcgttgaatatttgatgagtgactaataatcggtaaaacccctaaggtaagtattctaccatcattgttgtgatgcatgtaagttagttcattaaaatcctgaagaaaaggtagtgaagtgcatgcatggaaatctaatgcctggataaattgaatatacgattacttaatcagtttagatttgtttctactggatactgaaagtttggtataaccactttgatggtcaatatttctataaaaaggatcactaaatactctataaaatactctaatgtactaatctagtggggccgtggtcaatgtactttcacataaggtctataaaatttctgcttcaacaattggcaaagattcctgataaaagagatgcattccattcattcttgagacacactctaatgcattttgagaatctttaaaaatcaacacccatgttctgaatgaggtttctttctcgatgtaaacacatcttgtattttcaaatgattcattaggagtgaaccattcaaaatcccataaaaattgcttaaatccgtgtcttgatatctggaatggtacatttcttataataacacagtatgaacgatcgaaattgtggaaaatctatattgtttttctgtaatttgtctaattaactttgaataatgactatgaactttagcatttgaaaatgttctggttttcattttgtggaaaagagattcaagtgaactattaattttagccttttcttttgtaaatgttttatgttctgattgttctgataaatatgaattttggcaatatttaattaaatttggtatatctgatatttcaggtaacattgggaataataagaatcttaaactattgacaaaagtatcattacaaatatcaggacttaggacaagaccattcaatgttctaatatcttctgatgggtaattatttaaataagaattagcatcatttagtgaatgaaattcaatgaaatattgtgaattatgtactaaagttaaatgaatatcgtccattataaacatttttaaattctatattaggactgattctctgtaaatcttttttgtttagccatttattggcattatatacttgtagtattcggtatagttgattttactgatgaatgttgatgaatattactggttattttattcagtattattactattactagtatcaaagtggaaatcaaacatatcagcagtatctgagttcatatgaggaagtgagaggtccccactctttggcacattcaccaatttcctgagcatagctctctgtatctctctaaatgatagcgatgacattgtctatgttggataagctataagctataagcaataagcaataagcaataagctatattatgtaaagaaacatgtatctgaaacacaactttaacgatgtcgtggaaaatgaaaatgaaaaatcgatttttttcaacttggaaagaaaaagtgaaggaaattgaatgacttttctttatctgagactgagagaattaaattgtggcaaattattaattatgattatcgatggatgttgtttatcgatttttattattcattctttattctgtatcaacagttagttgtcttatagtccattagcagcatctcatctgagtcttgtacatagcccacgtctctcctgccatctactcttgtacaaataccttatttccttgtccatattttatattctgtgttatattaaattccaattccaattccaattttatttccaatttacattccaatttacatttatatttacattcatattttacaatttacattcaactttaccttttaaataacattctctttcatctgcttgtttaatcttttagaaatgacttcttggaataataattataaggcttcatcaattgatgaaagtattgtatcaaatccttgggaaaatctttcaaataagggcaatattacaaatttagttgctccaaatccaatctctccaattatttctcataatcaacaagatgataaatcaattcaaggtttaaataatacttcaaatattgcttttaatcaatcttctttcttaaattcttttgcttcaactaataaatatcccatgattgatgaaaatgcaattagtgaaactggttctgatgctcttagagatgctaatctctgcaatttcagctccagttgcaactcagcctttaaataaatcaagatttggtgctaatgtttttggaccttcaactgtcgctggtgttaatgttaatgttccacattttaaatcttcaaattcgaaccttcttggaaaaattctcttctgttactgaaaagacaaaagaattagagatctaaacaattgggttcaagaagatcttcaattttcaataatgaaccaaagtctcctcaacaattattcagagaaccaagaaaacaatccttttagtgaaaaattagaatcttacatttctgctactgcttccccaagtaattcaagacatttatcattcagctctgaaattgctcctgtaaataataacaataacagtagtagtgttaatattagtatgaaaaatatgactattaataatactattaataatgatattagtagttttggctctgaaaatctttcaaatcatgaaaatgaaaaagctgatttcaataatgcaaacattaatggctcaaattcatttaattttaaaacaagttggaatcctgcaactgcaacaccattccaaccaaattatggatcgattccggaaatgtcatatttacaacatcaacaaccaatgattgttccttcttttcctatgatgggttctcaaggtatcccaaataatggattttatcctcaaatgttcccaccatttttatctcctcaattacatgatgccaaatggtactccaaactactggtgctgaggaaatgaaaccttcatgacactactactagtcaatatggtagtactaattctgatttagatgatattaaaaataagtcaatctaaaacagattttaataatcaagttgaaaatggtaatcaaaacaaggttgataacaataataatgaaaataaagattcgaactgagaattcaaattaacaattctaacaataataatcaccatcctgatgttttcccaggttacattaagtagatcaggttctccttatattatggcaccattcaatccagtatggtatgtttccaccaccaactggcggtagtttcatttcatctcctggttcacctattggtgcagtttcatcaccacctccaccaggtatgatgatgccaatgcatatgatgggggttgcacctgttggtccaagagatggtaaaggtacaaccggcactaccatcaaataagaattcaagatcagccaatttcgtcaagtggtagtaaaaagaatggtggtaatggtaattataaatctaataaatttaataaaaacaaacatattgttagatcaccactattagaagaatttagaagtaataaagattctaaaaaatatactcttagagatattgcatcccatggatatgaatttgctaaagatcaacatggttcaagatttattcaacatgaattagaaatcgcaagtgaagaagataaagaaatctttttcaaagaaatcagaaacaattcaggttgatttaattactgatgttttcggtaattatgttattcaaaaatattttgaattcggatcaagtgttcagaagaaagttttatttgaatccatgagaggatcatttaataatttatcagttcaaatgtatggatgtagagttgttcaaaaatgtttagaaggtattccattagttgatcaattagatattttagaagaattaagaccaaatattttgaatttagttaaggatcaaaatggtaatcatgttattcaaaaggcgattgaaaaaattcctattgaaaaaattccatttattttaggattcattaagacaacaaatttattatttatcaatgcatccatatggatgtagagttattcaaagattattagaatgttcaaatattgaagatcaagaatttatacttgatgaagttaagaattttatctattatttagttcaagatcaatttggtaattatgttattcaacatgttattgaaagtggaaaaaagaaggataccgatattattttaaaagttgttaaagataatttaattgaattatctaaacataaatttgcatcaaatgcagttgagaaatgtattattaatttaccaaaggaaagtagaattgaaatttatgaaactatgttaaaggataacttaacagaagaaggagaattaaatgaacaatcaaatttaatgttaatgatgaaagatccatttgctaattatgttgttcaaaaaatggttgaaattattgatgattcaagaaagaaatttttagttatgaaagttagacaatatttgaaattaattcaaaaaagtagcaatggtaaacatttagcaagtattgaaaaattaaacaacatatgtcgtaactacgattagttattataattatgacatccttttatttccttgtatttttgttcttttataattagttacatatacagtatattaacaaaaccgattatattctaaatcttattacgtaatcatttgaagatttgaaattttcctcttctcagctttttactaagtaaaaatatttttttcttgaaaaattaattgtgaaaatttctttcatgtttgaaattatttaatccatctgttattacccacaatatcagcataatgtcattagtagaagatagagattctagtacggaattggatgatatattcaatctattgaaaaaaaccagagaaaatagtaaacagaacaacaaagatagtgaaactaaagataaaacagaaggtgaaaaataaaaaggatgaagaatatgaacaattgaagaagaaagtaactagtttaccaagtattgaattacatttatttaaaaaagaagatgataaaaataataaaaagagtaataatcgtaaaattttgaaaattgatgatagtgttgagagtattttaccagataaatcagataagacaataattgatcgacgtttaattaaggaacaaaattccagtaaatggttttcattacctaaagttgaaatgactgatgaaattaaacgagatttattgattattaaaaatagaaaatatcttgatcctaaaagattctatcgtggtgaaaaatgggaaattccagaaaattttcaaatgggagaaattgttgaaggtgttggagaatatggtggtaagattaaacgtaaacagagaggtgcaacattagttgatgaattattaaaggatgataatacaaataattggtttagtaaaacatttaactgaaattcaagttaaaaagaagagtgggggtaagaaatttttgtctaataagattgagaaagagaaagaggcgatagatatgataatataccatatgatttatgtagctaatattgtcatatagtctcaactttatctttaatcctaatcgatataatataagtttcttaatgtaatgtctaatattacgtaatggatgattacataataaaatccgaactaaaattaaacccgagttagaaaacatgaattccgcaggtaccgacgtaaaaaaaagaaatttaatataaactccgtcccacttttaataactcacggaaaaaagggtagcaagtgtcctccgtattgtatcttggtattttcatcgaatctttcaacatttcacaaattatttcctttcatatcaataatagtagtgaaatttgtattgaaagtttgtatacccttaactcactttaaattttgtttttcttgctattcattattaaatatcttgtttcatcaaactcttaattgctccgtttcatttactaaacttgctttatactctctagttatcacttgtatcttattattgcttattccaaataaagttggtaatatgcttctattgtaaatttatttcaaacttacttctttcactatgtaaaatgtatttttgctacatatacgggaaaatagcaacataattgtaatatattaatgaaaatcaaaataattttatgcacactgtcttaaataattgtctctttttgtctttcaatatttctattatatagtctcactttcactttgaaatattgatcttcttataacagtaacctatttagagactgtagtaatgatatatagtatatatagtaactgaatgttgaggatactggttgtacttgtgataatatgaaatttattattcacacattaatggtttcaactgtaacgctttcaatttctttacacttttattgaaaaaacaagctacaacatttctattaatcactccatgaatgaaataatttatcttgatgaactattaaaattgtttagaaccgttttattcaacatgcgaaattctagaaccatatctgataaataacgtctaatatcacattcttaaccagtagataatcgttatgacacctgagatagacgaacagttgaataaacttagtttccttggcacttgattaatatctgtcactggaagaatgaagggttcgacttaaatacctttaatggttgattacatttataaaatatggtgttaaacaccttgaaataagctatactatactggaaaaattgtttactggaagtagtgaataactatacctatcaccaaaatttaaatacagaatgtattaaagaaaagtatgatacagtgttgaagtgtttgttgaagatacataagattggaaataaaatataataccagcatagtggcatagtgtttattgaagcagaatattgtttgacaaagcagtgtatgaattcattattttgaatcaattttcactagaaatgaagtatgatataatatactggaaagaaataaagaaactgtttattggaaataaagagtagtatttgtttgatacaaatagtgtttatcgaaaaaagtttctatcagaagttgaatactatgtataggaaagagaatgtttactgcaaacaaagactttagtgcttatcgttcaatggattataatttatttgaactacttgattttttaataaacacaatattataacatactccaattcaaggcaacattttacaatagctattagtttctatgggtattatttttataaattataaacaatattttttaaacaattaaaagaaaagttttctaatagaacagctataacaaaataatgtaaacggtatataaaaaaccaaaacaagatatagtaaagattgaaaatgtaatgtaataattaaataaattaaatacgtctattattatattcaccaatttctcttcttcttctaagttcagcagctgcttcagctgcaccaatttttttaactaattttgtatgaaacaatccacaagcattacatagagttttagcatcttctggtcctttacgccattcaggtgttgaagttgaaccacaatgttgacaaataattttcttttgaatacttaattcaggttgtaatgttccatgtgaattaaactcaacaattgaattaaatttcgtatttggtttaaatggtacaacttttaaaattgattcatcattatctttaaattttgaatgtaaaattggtggttgtaattgtgtgggttgttgttgtggtattaatgttggtggtataagtggtaatgatgatggttgtggtggtggtggtggcatattcatacccatgttcatatttatacccatacccatactcatgttcatgttcatattcataccatttggtccaccaactggattgattattggattagtattattattataaggattataataagttgtaagtgctgttgttggattattattaaacgttgtataaggttgaaatactaaatttggataattttcaattggtttaatttgataatttggatctttgattttaatccaatgtaaaaatgaatttgccaacgaattaaaagttaaataaagtttctctaattcaattatcgataaatgttttgtaaatttataaaattcctcaatttcataatttggatcattagatttattcgaattgccatttgtacttgaattttcattttctttctgccttgttctcatatcatttaaataacctttcatatttaatttatgtgagaaaaaatcatctaactctttgaaattttcaattattggatcagtttgtagtaaggattgaaaaatttgtgcaggatgaataggatatgatggaaatttgaggaaacatttaggtcttgattctttgataccatcagtagaattattattattaccattattattaagatcattcaaaatattgttgctattctctcttatattcttcaaagcactacttattactgattcccttcttttatcaactttataaccatcagtatttattgaattttttctatttttaacattatcaatatcattagttgttgaagttgaagttgatgaagatgctacattattatcattactttcaactttctcaatttttgatgttgtaattgatattgaattggattttgaatgatttgcttcattgctattatttgaactattattaaaatcattcaatcttaaaattggttgaggtggtaatggagtattttgaaaattataatatggtagcatattattttgacttggtggtaagtaatattgttgctgttgttgtggttgtggttgtttttgtggaatgaatgattgttggggtattttattgatttgtgacatttgtaaattactattcaatacatttgagttttgttgaggtgatggtaattgtgatgatacatgttgagtttgcacatgctgatgttgcggatgttgatttgttgatttgctgtgattgattctgttgcggttgttgttgttgcggttgttgatacaagtggacttgagatagccgatgattttgatcaatatattgagttggttgatattgtggtggattcatcaaatgatagggatagttattttgagatgtatgagatttttcgggatttgtaattgttgcataatgttgttgatattgtggagatacattggatggtagttgctgtttagtattctgatgttggctatactgaggattttgtgattgttgttgttgatgatgaatttgttgatttaattgatttttttgctgtgatattatattttgaatattcccaaaattctgatgattttcagtattaataatttgaggtaattgttgaaattgatatccataagcagaataatgatcttgttgttgtgtaggttgttgttgaattaattgtggattttgaaaagattgctgctgccgttgttgcggcagttgtgtttgatattgggattgtggttgcggttgttgctgattttgaggttgttgtgcctgtggtggttgcaattgatgtggagattgttgctgtgactgttgggattgtgattgatgcaaatttaaattgctgggtaattgattgaaattagacataattattttttttttcaatatgatgtttgttttgaaaaaagtttcaatttccaaaattttttaaagataatagtgaatataatatacaagattgattgatttgattaaaattaatagtataatgagtgtaatcaaatataaaaatactgattcaatgtatgattttgtatgaacaattattatatacaatgtgaaatttgagaagtcttaaatgcggctaaaattatgaataaaatttaatattaaaatgattctttacttcttctctctattataacaattgctaattaaagtgtatagtattgttattaatatgttagtgtgtatgtattatatgtaatatctttaatgtgtggaaattaaaaattatatgctgataatatatgatgtgataattaacttagagtattgaaataatataaattaggttatagcgataatagaaaacactaaggtgacaaaattattagtatatctttcggagttataatctattatagatgtagtattgtagtatatggtatagtaataaattatgatgaataatatggatatatagatatacaatagaagaatatcgatatgatgatagtggtgatgatggtgatgttattggacaataataggaaattgaatagtatatgtgagagagtaaaggttaaatattgacgattggataaataatagatggaaaaaggttaaaatctttaaaatcttaaattaaaccggttaattccgtatataaaaaaacaagagatttgacaattatgaatcaagattagcaaatgcaggataatagtaaataaatgtcaaaaattgataaaagtaccaataaaaagaaaagagaataaggaattatagaataaaattctgggacataaagactatattaatagaagtagtggaaattaatatagaattaattttttatagtaaatatagaaggaaaggctaataaagtaaagaaggataggttgtatggaataaatttattatttcatatgagttagcaattatacctatataatgaaaaagtgatcaaaggacgttattatgatgtaataaaccatagtagtgtaatatagctttaataataaaacaacatgaaagtataattgttaaattaatatagttaaataataataaatataaggagtaatacgaaatagttctagaataactttaatgagtacatgtacaattgactcaaactaacactgtaatgacatgtgttaaattgaataagtttaattattaatcagtttgctaaaatgtcaaagatttctgggcagaaaaccaggcttaattatgatctattgtcaatatagactaataaaaaacaataataaaagttaataattaataacaataatactatttattaaaaacggtttagtcacttaaacattgcgtttgatctgttaatccggacctatgcatattgtttaatctctgatccgataaaaggttacattgcattgagattttatagttgttgctaaatacaatttttagttactttaattatcctagatactcatatgatatatacacttcaattttgatgttacatgtatcttagttaaggatagtatgactttaaactaattatattaatgggaaaaaaaatcataagttaacttacaagtaacaattgaaaaaagttggaaagttaaaggaatttactattgttatagataattgtaaacgtattcggtgaaccatttttttttgtaaattgcatcagatttacctgatattatggcttactacaatactataaagatttaccgaaatcttttaaaatctaggaaccaaacttaaacaataaaaaattttcgtaaatgatgagtttttgatatataattttgatatatttatcttgtaaatgttcaataaatctataaatgattcttgttcttgtacctgttacaaattatactataattaataacggttcaatttcgggatgaaaaaggatcttgtaaaaagggggtaaagtgacgttttacatcattaatagtgtcgtcatcaaagccaacaaaaggtgaaatatgtaataagggttataatttatatttcgttaatttaagcgttaacaataagaaaaaaataataaaaaataaatgaatgaccccttaaggttaaattaataccctcttaataacatttccttttctaatcttatcttcttcatgattatataccttttttacatctggctctcttctggtaggtaagatatgctcttattgtagttcaatgtatggattcagctccctgtaaatgatggaaattctaaaaaaaaccaataaattatagcttttatatcttacttatattaaagagagtgtagaggttttggattcactttcgcttgcaattggagcaggtttagaatatgttttagagtatatcaaacatcaactgttttcattgttttaggtactgattcaatgaaagtatcggtatcaaatgaaattgctttattacaaaggcaagtttttacaaattattatgttaatgatatatacctttattctgaaacttttggataatagattatatatattatatcctctctttcaatgatcataatgatatattaataataattggcttattggataaatattcagtatataccttacattgttcaattgggttaacttcattaattaagtagacaagttgttacgtaatctgccaataattacaaaatgaagcattaaattcattacaattcatatgaactgaaccagtactaatatctggagagtcctgttgttgaaaagagattgaatattaccaatatatatatatgaatattgttgaaaataacccaccaagtagtaattggaaatgtcaatttccgctttggtaatttgctcttgtgagttaattatcattatattaattattatcattacagttagaatgcttattatttgctcaatttgctcattttattcttccttatcgtcctatttgattcattcaacggtattcaaaggttcaatttatatgctcatactcattcaatgttcttataaactaactatataaataattcatctattctgctattatgcacaatttctaatggtttttcctaaattatcatattattattgttaattcaattcaatcaatttaataaataagaatggaagcagatccttggactggtaaagatttgttatatgatggtgtttggtgtatcaaagatatgggtacaccaaaatatgacgctttacataaactttcacaaaaaacagttacttatatggatcaattcaaatatggtcactatttattatattttattacagttataatttcattatttattataaaacgtttaatttattttttcactgataggaattctttaattgttaacaaaagttcaaattattcaaaaaattggtattatagagtagctgcttttaatagatgggtaagttatagaaggttaccaagttatatttgtgagatttgtcaattaccttcatcattgggtaatttgattatcattttagcaggtttaatttacatgctttgttatacattcatacctcatttttattacagaggttgtagaggttttggttcacctccattagctgtcagagcaggtattgaatcaattgctttaattaccaatttcaattattctttcaggtaaaactaacttaatttctcaattaacaggtatttcttatgaaaaattaaatgtttatcatagatggatttcaacaatgtcttgctttttcgcctgggttcatacaattccattctatattcaagctgttagagaaggtggtattgcaagattaagctggtttatgggtcatgatgataatttatacagaaatggtatagctccattagttttccttactgttttaaccattttttcacattcttatgttagaaatgcttggtatgaattatggttacaaattcattggatctgtgcacttggtctttatgtttcattatttattcatgttaacggattaatggatggtaccaaatatatgattgcaacaattgttttctggtttactcaactagtttggagagctgttaataaatcttttatgagaccaaataaaggttttcttagagcaaatacgtgcagaatgaagaaatttcattcaaatggtgataatcattattttgaattaattattgaaaattcaaatgattttaattggattccaggtcaacacttattcattagagttactggtttaagatgtattgaaaatcatccattctccattgtctcctataacacaccaagggaatcagatgatataaagttaattattaaggccagtaaatttggtggtataactaaagatatctatgataagttaaatgatattgattataccactagtaaggtaatagttgatggtccatatggtggttgtgaaagagcaatcgatgcatttgattctgctttcttattttgtacaggtactggtgtttcagcagttttaacatttttacatgatgcatgtgttaaaattgaatcagctgataatgttttaaataatgtcacatttgattgggttattagaaattttgaaaatatcgaatggattttacctgaattgaaattgattattaacaaatacaatagattaattgaaaatggtaatgttaagatcaatatttatttcaaggaggaaacttcattaaatgataaaaatgttttagaaaatatcaaacatcaattattcacaatatcatcagtcaatgaaggtgaagctacaagtgaaagtgaaactgaggaaaaacatgaaaatgaaaatgatcaatcattaaaactggttaatttagttaatgaaaagccagatgttaaacaattagttaaggataagattgatttattgcagcaaagaaatatattcattgtttcaggtactgattcaatgaaagtctcagtatcaaatgaaattgcttcattacaaaagcaagtttttgcaaacaataatattgatgaaatctatcttcattctgaaacttttggatggtaatttatctgttctctatattcattttaactcactatatatactgtacttatataacttacatcgatacttattgtctactcttgatcacaggtcaagtactgttgatacttgacataatttcgataattttatcaatgctaagcgaatattttttccctttgtttacatttcataatttaacatcaacatgtgaatttaagcatgaatttcttctattgtttacaattgcaattgcaatcctctgtaaaagtaactgtagaaattgtgataggtcacatttttccacattgttaacaatccagcactattgatatataattaactataggatcataaacatactcttttcaataatatacacatcattatgaagaaaacttctagaattcctcttcaaaagttttctaatagtagtatctacttcaattcacaacagaatactagtacaaatacaaacaaacgacagaaactatcaacagagaaaaataatattaaaaaaccaacaacaatggcatcaattattcaaactgtaacaacaaatactaaaatgcaaatggatgatatatcaaaattgaagaatgataaaatgaatgatttatcaaatctcaactctgaaatttggaaaattcaaacaaagatacctgatattgaattgaaattagagaaattaaatttgaaaattatcaaatgtaaatcaaatttccaaattttagaatgtaaaattaaaaatttatcatttattaaaactgataaactaaattcaattaataaatcatttgaaacttttaaaaaaaatctgaatacttcatttgatgaaaaagttactaaactggcacaattttatgatgaaaaagttactaatataattaatgaaaaaaatgataaatttaaaaaaattcgaagatgaattacttagagaaattgaaactttacgatcttcaattaatgattattctgataaaatactaaatgaatcaaaggaaactatcaaaagtgatattaaacttgaaatatcaaaatctattgaaaaacataaggggaatatgattaaaatgaatgaaagtatattgagttttaataatgatattgtaaaattagagaaaaatattgaagatttaagtgtcaaatataacacagaaacgaaaactaaactgcaagatgtagagaaggcattagaatcactaaacaatgatattcaaaatttacaagatgaagaaattgaacttaattataaactaagcacactgaatgactccaaagaggaagaatgtaataaattattaaaattacaagaggaaacacgtcaactttcaaaggaaactattaattataatttaatgataaaggaagaggaacaatatagaagatttttacataatcaattacaggagatgaaaggtaatatacgagttttctgtagaattaaacctgagaaaaatattgataatacattcaaacatgaaattcaatcaatgatggaaacttctgatctaaaagaatcattggttattaagtgaaccctgagaatcataatcctaataatagactaacagcatcaccaactaagaaaactaataaacaattttcattttcatttgataaaatatttgatgaaagttcaacaaataggtgaaatatttgaagaaatttcacaacttgttcaaagttcattagatggattttaatgtttgtatatttacatatggacaaacaggtagtggtaaaacatatacaatgagtaacttaaatgatggattaataccaagatcgaatgaaattaatgtttgaaaggataaaaatcttaaaatcattaaataaagattatcaattatatggacaatttttcgaaatctatggtgaaaagataaatgatctgattgatgattcaattaataaaggtattgaatttccaaataaattatttgatagtgaaattaataatattaaaatgattaaacttgaagtcaaccaatcaaattgataaattattagaacattcaacaagtaaaagatcgactgcatttacaatggcaaatgacgcttcatccagatcacattcaatttttcgggtttatattacaacaattcaatgaaaataatgaaactttattaattggaacattaaatttagttgatttagcaggtagtgaaagattatcacaatcacaagttataggtattagattaaaggaaacattagcaattaataaatcattaagttcattaggtgatgttatacttaatttaaaatcaaaatcatctcatataccatatagaaattctaaattaacttatattttaaaagattcattaggtggagattctaagacgttaatgtttgttaatataagttgtttaaataatcattttaatgaatcattaagttcattaagatttgcaagtaaagttaataatactgttttaaaatgaagtatgttcttcagagggggggggttcttttttactatgtacattatttataatattatatattgttctttttatttatctgatataagtttaacatcaatatgaggtttatcataaggatttgctaacagatcaggataatctaatttattatcctctaattgaccagatttaactaagttttcccattgaacagggaatttttccatacaatattcctttaattcattccttacaccatcatgtaaacaattattatgtaaagttttcaaaacatattcattaattagatgatgatcaccattttcttctgcaataattaatttatcaaaagcagttctaaattgttcaaaataacaatttgctatcaaatattctgcaaataaatttgaatctggtaaaatttcataagttgataaattgttataaaaatcatttacatgatctaaagttgcaaattttaaagattttaacatccaataagctgattcattatttgttccaatttcctttggtaatgaaaatgataaattgaaaacatcacgagttttaaaaggatcatctaatgatgaataagcttccattaatgaattaagtaatttaatatctaaattaattgataaatccattttaattgctaaatgtaatttaaagattgcatcctcatctttaaattttgagaaacttttcaaaagataaatataaaattcttcatttggtggtggtaattttaattctttactctgctttttcatatttgcaaatacaattaatgccatttgaggatcattattatcaataaacattttaacaaaatatggataataatcataaggaatttggaaataatctgttaaatatttataaactcttttattcaattcattatccaatgatttagttgttaaataatcataaatacaatcgaatattttttgatattttgaaacatttaattttggttgatcttttttcaattcaggtatttgatctaataaaattttaattgcgaaaactccttcattttgatcaattgcacttttcatcattaaataaattgaatctttattaaataaatattcataacgtttaacattttcataaatttctaatttaaatgaccaatctaatttaggatgtttccaaatatttgcaactaaattaaataatgttatcatataaataccttcataatcattttcccaatctacattatctttaaatttcataaaataattacctgcaatttcaatactatcatttgaattaattgaaattaaataattaatcattaatgcaatacttttagaatcaattggaacattaaattcatcttggaaattttttctaaatttttcaataaatttaaaagatttattagaccaaattaatgattcaagtattaaattatatgaatcagtatcagcaaattcataatctttatcaagtgataataatttttcattaaactttttaacaagttcaagtggtgattcattttcattaaggttataagattcatattgaataagagacatccaatcatattcaacatattgagattcatcaattgattttagtatattaattaaattttgagcgtataatgatttttggaattttaatgaagatgataataatgcatataatatatcattttgaattaatttagaataattatcatttgtgaattgatttgttaattttgctaatttttctaataattgattagatacatcattataattatttttagttgcaaaatataatatttcaacataagaatcgaaagggatttgtaattttcttttgttccataagattaataaattttattaatctttcattaactaaattatcttcaaaactttcactaatttcttcatcagcagctttgaaaaataatgaaattaaattatttgaaattttttcattatttaaattttgtataatttccattaataatataatagttgcagtatcaggtttaatttcattactaaaagcttcaattaaaatttcgacaactttttcattaatattaatattattatgattttcaatttcttcattaatgaaagcatttataactttaataacattatctctattagtacttaataatatataattaatgaaaatttcaaataattgtaatctaattgattcatcattaagataatcatttgtatttcttaaagcattataaaatcttgggaaaaaatcaatataacgtacatcagttaaagtcattgcacctagtacactattaagcattaataatatttcatttgaattaaatgaatctaaaggatttggtgtttgatcaataaaattaataactgaattaatgaaaggtaaatttttatgagggaattcaccatttggtaaagaattaattaaatgaataagtaaaactttaagtcttttagcctttattttgggtgacattgaagtatttttaaaagtattttgaagttcgaaatagtattctgttggagtatttgtgtcaattgaaggtaatgttgaataatgtgaaaaattattcatattatgtaaatgtgaagtatttttcaatggatataataacatattgggcagtttagtgaatataccattatgagtgggtattctcctatagagtataccatatgaacgtcttaacatagtgttatttataagagaatatatacaagaagaagtagtaaaagactatactatacttttataaatttgaaggtctctcacttttaccctcaccaattacttcacccttgtcattatacaacttaacatgtctctgatactctttaatagcccaattaagaccaacaaattgtatatcaggatcagaactacctctactaagggtataacgtttccaaaaattaacatctttaaatcttggatcttcctccctgaaatccattttgtaatcttaattgtgcaacttgttctcttaaataatcacaaactcttgatcttaaatctcttgcctctgaaccaaactttaattcatctgataaatcatcattattatccttattaggatatttattacataaatttttccattcatctctaaaagatttaattacattatcatcgattgccttaccaatattaacagttatagttgaaccaatattacttggagttaaataatcagttttcatatcaattctcttctggacgaattttttcaaaaccatcagcaaatattggtacaacgactaggagcaattgttggttcaagtactaatcttgcagtcccccatctaaaatatctcattgaattttcatgaggtgattttaattgacaaacaaaaccttcagggaatatatgaacccaacttggtttattacgtagaattggaggtggtaaagtaaatttttgtaaatttaatgaattatctggtgataataatctaatacaggcatcaatacttggttggaaaggacctctaccaaatctttcacaaggtaagattctcccaagggagaagaaagctgaagagattttatttgtaaagcaaacatttgaagcagctaacccccatctaatatcatcataattaaagaaataacgccaaggtaaacaagcaaataacattggatcatcacaaggttgacatatgattagcaattgttaaaatagctcgattattatctttagcatattggaaagcattatctaaatgatttaaaccctttaattcaacattatagaaagctgttagaattaattttgaaaaagccgtaacagttgaagcatgtaaattgagaagctaatatccaagaaagggaatgacgaggtctagttgataataacttcatcttcacccctctgtagtacatcatcaaatgacattatgattgttaggagaggaagtatgaaagaaagagacttaataaagagagttaataaagaaagagttgtatatatgaagagtgaaaaatatttaattaagaaaagaaaatattacataataattaataaactatacttaactacttacttctttttatttgtaaaacgttcagttacatgttcaattttaatattaataccattagaatcaataaattctcttaaataagattcaacttcatctgcaacatcaccttgaatgacaatttcatccttcttttcactatttttactaattgaacaaccagttgcaaattttgaagaaaattttttacatgttttcttcatatcgaataagttaggatcaagtaaatcaagattagcaattgcaacaatatatttatgttttgtacgtggtattctcttaattaaaattttactattttgtaaattaattaaatctctctctaatttacgttcttcctttaattgcattttagctaatgaattagaaattttctcttcctcctctttagatagggaagatttaatatctgaattatataatttattgtaaatttcattattatttgattgtaaccataatttacattttttaaaagatttaccaaattcacaaaattctactggtaatgaacaaatttcacaatataataccatcgttatgagtatatgagtatatgattatatgaaaagaaagaaagaacagtatagtaacagtaatagtaatagtaatagtaatagtataaggttaataaagtaaattttcaattaatagtgagaaaatggaaaaattgtttactattagtatagagtatactgagtacttcttgtttattattatagacaatgacaaaatataatacattattaaaggctaaattacaggaattattagaggcaagaggattaccaattgaaggtaccaaggaggttttaattgaaagattggaggaatctgataaagttgcagctgaattagatgaagatgatgatgttaaggaggatgttagtgaggctgttattactgaaaaggaagatactactaaacctactgaacctactgagactaaggaagtagttacagaagaagtacctacaggaagaacctacagaagtacctaccgaagcaacattagaaacaagggtattagaattactcaatactaaacttaagagagcaattaaattcaatgaagaagaagtaattaaacgtctcaatagtgagatattacgtattaataaatttggggtaagtgcagagagtgcaattgtacatgaactcaatggtaccaaacctaagccaaagtctagtaataaagtgatgaagagaagaacaccaaaaggattcagaggtagaaacagtaatagaaacagtaagagaaatagaagatattaataaagagcggaaatagtaaatactaagtaaatgactttatagtagtaaatccctcatttttaatttttatttataagagagagggtcccttgtttttttatttgttttattctttgttctattgtactgcactttcttctctgggacaatgtcaattcactccatttcaactcattcctctatatcctctcattctactctatctagagatgatatagttaataatacttctaataataataataataatacttctaataatacttctaatattctcacacctccacttaatgatgatgattttgctcctcaagcttatgacccagaagatgctcaatctcaattatctggtaacctttcttcaactttatctcgtgctgaatctttgaaaatggttagaactgaaacggctaaatctttgaaaaatttaggtcttaataaagttatttcaattgctgatccaattagaccttctaatattaataatcctatattccctgaagaatatactttagaaacaactactggtttggtcccagtagaaactttacatgaaattggtagatctagatcaaaagctcaaagtggtacctacttcttcatttaatcgttttcccactaattataaccaagataatgaagatgatgaagatatccttcaattggaaaaggaaaaagaacaacagaaaaaccaagatttagatgaagaaagtcaatcttctaaaactaatcctccatttgatccagaaattcaatttgttaccttctacattaatgatccagaaaatcctcataattggaaacctttccttcgttggacttatacaattatcctctcattaatggttgtctgtgtcgctttcggttcttcaattgttacctggtgctttaggtccaatgtctgaaaaatatcatgtatcaactgaagtttcaatcttatcttgttctttaatggttttaggtttcgctgttggcccctctatttggtctccattatctgaacaaattggtagaagaccagtttattttatttcatttggtctatatttcattttcaatataccttgtgctgtggctccaaatattggtactatcttagtttgtagattcctttgtggggtatttgctgcttcaggtttagctaatgttggtggttcaattagtgatatgttcccaactgaaactagaggtaaagcaattgcttattttgctgctgctccttatggtggtcctgttattggtcccttagttggtggatttattacaagatataatggtaaaatttcacttatattttgggttaattttgcattttcaggtttaatgtggattattggttctttaattcctgaaacttatgctccagttatcttaaagagaagagctaaaaaattaagaaatgaaactggtaatgaaaaaattatgactgaacaagaagctgcaggtttatcattaaaagaattaattgaaacttgtctttatagacctttaaaatttgcaattactgaacctgttcttgatttaatgtgtttctatgtttgtctaatttattcattactttatgctttcttctttgcttatcctgttgtatttggtgaattatataattttggtgatgatttagttggtttagttttaattccaattataattggtgcaggtttagctttattaacaactccaattattgaatcttattatgttaaaatgtgtcaaactagaaatccaacacctgaagatagattaattggtgcaatgattggttcaccattcccggcaattgcactttggatcttaggttcaacttcagagaaacatattttttgggttggtcctgcttcttcaggtttagcatttggttatggtatggttttaatttattattcattaaataattatattattgatacttatgcaaaatatgctgcttctgcattagcaactaaagttttcttaagatctgcaggtggtgcagctttcccacttttcacaatgcaaatgtatcataaattaggtttacgttgggcttcatatttattagcatttattacaactgcaatgattattttaccatttgcattctataaatggggtaaatctttaagaaaaagattctgtaaagaaaatttctctgctttccctgatgatgatgatgaataattaattcatttattacaaaatacaaacaaacacagtcaaaataataaattatatctcttgtaacaatatctttttttcattctatttttattctacttttattctactcaattttttaataacttttataatattttataatatctaatatctaatatctaatatttaatatctaataatcaaagcaatgaatctcttataaattcattatcttgatcatatcatttaagttcactaccataatcaataattaaaccagatattggacgtttatttacccaaactgaatatttacaaatattccttatatcattgattgtttcagtattaaccttttcacaatattttgtacaatgattgattaaaatatcaatataataacaattacataaagtatctttattattattattattattattacagaaattatttactgagtttagtgaaagttcgtgacaattaagatattcttcattgttctacaagatattggttagtattgatgtttatatggttattactatactctacatacacaaataggacccatatgagcaatatccatggtaataaataaagaaagaagtatataagagagagccccaggaatgagaggcattttaaatttaatcaagcgatttttaaatttcaatttcctttctatgtaataaattcttgtttttccgttgatgattcaatttttcatatttggtatttacagtggatgactccttcatttattaagaatggataaggataaaagtgttgggaattcaactagtattattcgtaaaagacttaattttactgatgaatcattatggaaacaattttcctctagaagattacaattagttgaatcattatcattaagttgtaaaaaggcaagtgaacaagatgatgaaattaaaatgtgtgcaaatactttattacatgaatttaattttaatgaaaaatatttacctgattttgataaattagttagatttgcaattcaaagtgttagaaggaataagaaaagatctcagaaaagattagcaaataaattaaatattgaaattgataatgataatgataatgatagtggaattgatttagaaaattattataattttaatgatgaagataggatacatgaaaaggaaaaagaaaatatacctattaaaaaagttaaagttgaaaataatgattttgatgatttaattaataatgataataataataagcaaattgatattgattctaaaattgcactaaataatttaacaagtccaataataccaacagattcagataaattaccatcattgaaaaaattaaatgaaatttcagaatttaatcaatcttcgaaaattattttacattcaattaaaacttctaaaacttgttttgaaatttctaaaaataataataataatatcgataacaataatttaaaaaattatgaccttttagaagaatttggttcaaattgtataacaactgctgttttatttactttagagaaatggtttgatcatttattacctgattcatcatcatatattaaattaagattaaagagtgatttaactttaagtttaattattaaaaatttagatcaatcatcaattgaagttaattcattaaataattatgttgcatctcaattatttaaaaaattaattggtggttgtgttaaagattttggttttaaccttatacttaatcctttatgtgatatttttcatagtataatattaaaagattatccaattattaaaaaagatgaaaaatggaaaagtaattcaagttcaacaacttcaattaattattttgatgaaaaatcattatcatcttcaactacaaatacaaatataaatataaatacatctaccactactacttcctcatcaaaagatagaaaaactaaacaagaaactcctgattatccattatcaacagctcatatacccattcctccaccttctgataataatattaatttaaattcaatttcaatttataatacaaatacaaatacaaatacaaatacaaatacaaatacaaatacaaaaaatagtagtccaattgatgaaaatgatatacaattaaaacatcaattaccagttttacgttcaaaacaatatattaatataattataaaatttaaagaaaaagaattaaaatttagatattcaaatgatagtaatgcaccaccaacaattttagaattaataatgaattgtaaacaagcatttggaattataaattcaacaaaattattaaatttaaaagatattaaatcaaattcaattattaaaaatgatcatcaattagagaaattacttaatttattatcaattttaaataatgattcaatgaatattgaattaatacttgaattaatttattcaaattcaactcaaggtttcttaaatttaaatcatgataatgaaaatattgttaaaattgataatccaccacctccaaaattaaaatctaatgatttaaattcaaattctaaaaataaaaaatcatcagattctttaattagtagatatttacctccacctagaccaattcgttcagatccaactcaaagaggtccattcctaaattttcaacctttgttataaatataatatctttattatgattatgatatgatttactgtgtaattatgtactttttataaatttttgttcttaaaactagttctttaatagatttattataaaagatgatgtcatatttgtgatatattgactttttcgattaaatgtttataattttaagaattttttattgaaagattttgtaaaattgagcaaaacaaaaagttgctctaaataggatgaaaactatattgctgaatagatttttttccggtactcttacggtttacttttgaggcgttttgaattatggtaactataataaataaacttttttgattaatttgaggtcacgtgacataattgtactcccctcataactaacataacggtattacatataacaattatccgatatagtgtaacggctatcacggtccgctttcaccgggcagacccgggttcgactcccggtatcggaactcattcttattattttttatgttgacttttaaaatataaaatttttttttttaataaatgattaactaaaattatttcccatttataacctaataaaacaatacatcaatataccaatcatagatagaacataacatataacataacataatataatataaccttattaattaattaatttgataataacatgaaaaaagagctgaatttctaaaattcgcgacttttctcataaattttcatttttatgcccgattgggtaattctaattaaatgtttatttcattattcatgaatgagagaaagttgagaggagagagaagttgactttggagaaggacaagtaattgtagtacattctcattattatattatacacttattaattattaattacaattgaattgtaacatctaacatctacaccatgtccaattattcagaatctggacagttcaataacaatgatgatgattcattatcattatctcaacaacaacaacaacaacaacaacaacaacaatcagaacaacagcttaatgatgttaacaacaatgaacaagaattagatcattcatttataccaacatttgggaaaaatgaatttaatcaactgtcaaatcctgatacaactcaagatgatgatgtttcaatcattgaagcagttgcagcagttgcagctgcaatgaatactgataataatatgatgattaataataataataataataataatcaacaaaatcatcatcaacatcatcaacaactgaataataataacctaaacactcctaatactactaataataatacaaattttaatgaaaatggattaaactttaataattcaaatgaaacttcaatcttatcagagacaacagatccaatggatgaagatgaaaatgaaaatgaaaatcaaaatttgaatcaacatcaacatcaacatcaacatcaacatcaacatcaacatttacatgaacctgaaaatgatggtcttattattattaataatgaatcaatcaactttaatgatttagagaaacaaactccaatgattgatgaaaataatcatcataataatttaaagagtaaaacaattaaatttactccaaataagacaagtgagaatataagaaaacctcatctatatatcacaaatccaactaataaaaaagctaaaaaggataacacaaagggacctccaaaaaattcaagatttttcagagtttataatttagatggacaaaataaaacttcaaaatcttcctcaattcatcattataatccttatagatatcctcaaaatagaagtaaacttaatcctcatcctgattttattaaaagtaaaagattgaataaaccaaaagttgataaattaggtaatattattaatattgatacaaataaaaatccattttattcaattcaatcagaagttaatgataatggtgtatataatacatcaacctcatcaccaacaaaaccagtcaaggttgataaatatgatccaactgaatctgaaataccaatttttaaaccttcattagaggaatttgaagatatttataattatattaattcaatcaaagatattggtaaaaaatatggtgcaattaaaataataccacctgatgaattcatacctaaattatcaattaatttagaatcgttttggattaaatcatcaagacaatcatggagatcaccagctgatgaattaaatacaagatgtgaattttataatcaattaagggaatatttgaaatcaaattcaaaaattaatttaaataaattaccttgtattgataaacgtgcaattgatttatatagattattttgtgttgttggtttacgtggaggtttccaaacgtgttgtaatgaaaaattatgggcacaaattggtagagaattaggattttatggtaaaattagtagttcattatcttcatcaattaaaagtgtttatcaaaaatatctttcaggttgggaaaaaattcataaagataaacaagaacatgatttccttaatttatcaagaaatgatgaaaaacattcacttttccctaaatcagatactgatttatcacaatctttaaataaattaaatgataaaattagtattataagaaaatcactcaaaaaagaagatccaattacaataataactgaagatcggacattaatcaacaagaatgttaatactgaaggatccttagaaactacatcagaaacaataacaaattcaacagtggatgaatcaataccaatgattttaggatcatcaagtacatatttgagaaatagaaatacattaacagatttaggattcaccacctattttgatcaatcaacaactcataaaaaaggtataacattaaatacattacaaacattaccaggatacgatttttataattggatagattcaaataaaattgatgatataccaccaactgaacttaaaatatcatcactttatacattaaaacaatttaatgataaaagtagaattttgaaaaatcaagtattaaataaattttatccacaagatcattattattatgaaaatttaaattatttagagaataaatattgggaacttttggaaaattcaaatataatttttgaaactgaagtttcatttaatcaatttactaatattcatgattcatgttctgaaaataaatttttatcagataaatataatgttttaaatgactcaaaacctggtccacttaattttaataattcaacaattactgatggttcaatgttacaatttattaattcagatagtgatacaattttccactcaaaattgaattttgcaatgtttttcggtacaaaatcttggaatattgaagatcattggttatataatatggattatcattatttaggtgatgcaaaatcagtttatgttataccaccagaatttcaaaataaatttgaagaattaattaaagaaaattataataaaattaaaaatgaatcaagaagaactgaaattgcaatgaaattatttgaagataatatatcaaattcagatatttataattcaagtattgaaaatggtgtttcatttgatttaaagataaatagatcaaaaccacatgatataaattttagtaaattgaattattttaatgatgattcaattattaaattcaataatgatttaatgttcacaccaaaatatttgaaaaaacatggtataccagtttatcatacatatcaagaagttggtgaaatgttaattaaagtttcctaaatcttattcatcatttttttcagttggtacatcagttacatcatcagttaatattgcaccattagattggttaaatgaatcaatggaaattaataaatggtttcaaaaacaacaaattataccaaatttttcattgttcacaatgcttttaataactgcaagagaatctaaagatattaaagttttatcaaatattgaagccaatattaaatcaattagttgataaagagatagataaaagaaataaattacgtcaatatattagtgaatattcatgtaattctgactataatgttataaataaactcgatgaagttaagttaaaatatgatttaattaatggatttaatgatgagaatgagaatctgaaacttgttgaagttaaaagtgaaattaaagagaataatgatgattttaatgatgtttttgatgtaagtaattataacaatgatgctaataatactaataatgaggttactgataataatattgttataaaatcagaaacctattgaagatgatgatacagattatgttgaggaaccagtaaccgatactagtgaaacaattggtagtgaaatgtttacaacattaagtaaatggaataaatttacagattctgatttagttgatattttcccaagttttatacttatcaagaatatgaaaaataaaagaagtacatttacaatgtcattagaattatttattgaaatgaatgaaaaatcattatttaaatctgatgaatttgaatatagcttaataacattagttaatgatgaatatttaaaggaaagtttagaaattttgaaaagtagatttctcaatattgagacatggtcaatcagatatcatgaaattattgagaagaatggtaagccaacaattgaagaaatgagaccaattttagatcttggatattttttatttgattcaaataattttaaaaccgatgcatcaattgaatattatagtaaatatattgaagaatttaaacaatttgaaaaagaatttaagaaaactgaaaattgggttaaaaaagttaaaactttctttaatattaaagaatgtaattcaattccattattagaatttgaagattttgttaaattaagttgaagaaattcctcaattgatgattacatgtaaagaaatcaatgaagtgatagaaatcggtgaaaatatgaaagattttgattttaaggcaaaagatttattaaataaatattccaaagaaaatgatataccaatgaatgaattagaattactttataatattggtagtaaattaaatgttaagttagagacatttaaaaaaattgatattttaatcaaacagaaaaaatggacgatgaaattagagaataaaattaattcattaagtgaattaaagcaattatatgaggatggtaaggtattagttttaatgaccaaaaatgttaataaaattcaagaatatgagattaatattgaaattttaaaggataagattgagagatgtaataatgtaattgaacaatttaaggaaattgagaaagatgatagacttacaagtattgaagaattgaattaaattaaagcatttatgtaaggaattaccaataattgatacattgaaaaatattgaaaaattaatttcattaatgacaaaagttgaaagaatggtaccagaaataattgaaatgattgaaaataagaataaatatatatgaagatgataatataaatttgaaattagattagaggaatatttaagagttatgaagaagagtaaagatattttccaagataatgatattgaaactaatttatttaataaaattttgcaaaaatcagggaaatatcatcaatattatgaaataattgataaacaaataattcaatcatcatttcaaaatataagatatgaaactaacgaatttaatagtataattagaattagtgaaaagggatattataatgaatttgataaatttgatgaagttaaaggtattaaatattttattaattataatttagatgttttaaactgtaatgatgatagatattgtgtttgtaaacaaacatatgaaggagatatggttgaatgtgagatatgtaaacaatggtatcattttaattgtattggatatgttaataataataaagagaaggagatagaaaatggaaatgaaaaagaaaatgaaaaagagaatgagaatcaagatattcataacaataacaatattaatacaattacaaataataataatattacaaataataataataataataataatacaggagatggtaaatttctttgtccattatgtgattttgaatgtaaattagatacaagtaagaaattttatgataatattaataaaagggttacatttgagagtatggttttatatgctaagaagattatgagagatacatgtaaattaaaggcatcaggattagcatttttagcaatggttggagaattttacagattttactattcagttattgaatttggaattgttgaaaaaattgaaaaaactgaagatgaagatggtaatagtgataaattagtgtgtaatagtgataatgttcaacaattacaccaattacttgagagattgaatggatgtctattccgatacgttgaattaggagatgtattacagaagaggtatgtatatcttcaaaagcaacatcaaaagagtgtataaccttacttaataataataataatagtaatactttccccgcattaacataacatgaaaaatttaaaatttaaaatttgacacaacctctgatccgtattcttttattttattttatgattattttatgattattaatatgattattatgattatctcttttgccatcttcttagtagttagtatttaatatacacaggagatgctcattaatctgtatcttgcaactttgaaacctacacctctttcgagggcgtctatcattaatattggggctaatggatataataataataagctcagaattaaatcatcatctccacttttattaagatatcattctcataatggccaaccatgtaacggtcattctcatactcatggtaatggtaatgacgatgaaaatttagatattccagaaaaaaatattcatcattattatgaatatattccaggtcaagatgttaaaaaagttgtcactgttagaaatggtgaaaaaatatttattaaaggtgatgatagtagtaataatagtgataatagtaacacaaaaccatcaaaacatggtcatgctcattcacatcctgaatttcctgaaatggataatatggatttaagtggtgaagattttacaattaatgttaatccacaaaagaagacattatggactcaaattaaaagattctttgatcctcattctccattaagtgaattaggtggtacagttaatagtcatactcataatcattctcattcatcagatcctgaagctttaaaactttatgatccaaaaaatttaacaaatgaaggtgttaaaattacttggattggatttggtgttaattgtagtatggcagttactaaatttatcggtggattttatttccattctcaagctttaattgctgatgcagttcatgcaattggtgatttaatttcagatatcttaactttaacaactgttagatttacaaataaaaaaccagattctttatatcctttcggttatggtaaaattgaaactattggttcattaatggtttcatttattttattatatgcaggtttccaaattggttggagttcattttatgaaattattgctccaattataccaaatgctttacatgatttatttgctttaattccagttcattcacattctcatgttgatttaacaacaattgtaccaaatgatcatgaaggtcatgaaggtcatgatcatattcatgaagcaactaaagaagttgcaaatattaacgcagcttggttagcacttgcatcaattggtgttaaagaatggttatttagagcaactcgtaaagttggtgaaagattaaattcaaaagttttaattgcaaatgcttggcatcatagagttgattctttaacatcagttgttgcagttgcaactatttcaactggttatttccttaatatttactggttagatgcaattggaggtttatttgtttcaattttaattatgaaagttggtatttcaggtgttgttcaatcatttaaagaattaattgataaagcattaccaacttcagattcaagatatacagaaattgaagattcaattaatgttattttaatgaaaaatgatagtcatatcttaattaaggaattaagtattttaccatctggtacaaatttaaatttagttttaaaacttggagtttcatcatttgataaaaattatgaaaataaattaacattagaacaaatgggttcaattggtgaaatacttaaaaaggaattatcaactaatttccataatattaaacatacatctgttcaatttatttcaaatgctgatgaaaagagtaaaatagagaataatgatgatgaaattaaggaaaaatttatataattaattcattccctcccccgatcatatcctattccattccattcattttagattattcatgatcaactaaagtaacgtatatataatgatttagatttattaaatagactattagatagtaaacaaggtatcctaaagtaaagtaaaataaagtaaaataaagtaaagtaaaactacgctttctggaagattccagattttctgttaggatttggggtattttcgctggtcattctagcgattaggttatgtaattgagtagtatgaaacgaataaataaattacgatacaatgtacaataagtcaacctgggaacttatttaacatgtgtattgaatatatgaacttaacctcctcttgaatgtatctgtttaatagattataatgtttgtactcagttatataaataactagtccacaacttctatccttgatcacttcacgtatctgagtaccagattgattggttgatctatttcttcatttcattcattccgaaggcgaaagaacacactgcaacacacacaataaatatccaatatttccacgagcatcagcgagcctaaatgctccactgggatttctatatcttcatacacttagataatctcgcaaaccagagaattactaacaggcttatgtcaatatcttcacctgacaatcatgactgactctacacactgtagcacatcacttcggcatactgaacaaccgaccttctatattaatctaatatagtataataatgttgaataatgttgaatacacgttcacgataattatcccgaactattgatgtaatcacttcagttctaccgagtacgtgataaccaaagaatcatcccctgttgattataataataatgtaaccttgacaacatactaacactttcacttattcatgtaactatcaattgatataataatgtaatatttcatcttctatgataattgatccgataacgagcccgtgaggtgttccctatcgattgcaccaattatattataatgtcccatgtattgtattatgattcaatgtaattgatccgataacgagtcccgaaggtattccctatcgattgcaccaattgtgatatagtaacacttattccaaagctattacatatatccgtttatgattgacgcgacttctcgtgttgaatagatttgacataaaccttaacattttccacatagtaaaaaaaaatttcctcgaagtgccggaataagtgataatatttcaccttataaaagagtttcatcccattcactgattctatcaatttattcttaatctttcatttattatcgcaagacaatagaataatatgtcattaagtacttttgacccagaaaatccagataatttagaagatattgaaaaacaatttgctgttaaagcagtacatcatatggctacatattggaatttacttgaatcaattccaccatcaaaacttaaacttacaaagcaagatgatgaaattttagataaattttttgaatcattcccagaatataataataaggaaaaactttcattattaaatgaagatgaattaaagacaaaggaagcaaaggaaagatggagaacatatattaaaaattttgaagaatcagttgcagattttaattttggtacattaattagaaaagatgttacaaaacattattctgaagagaattcaatatttgttgttagaattcaattttatgcaattgaattagcaagaaataaattaggtttaaatgattgggtttatgcaagtaaacattaatataggtttgctaatacttatataatttatcaattaataaatttttctttgtatattacactttaataataaaactaataaataaaatttacaataataataaggtaaagaaattacaatgaaaactatttaaaaaaagaaaagtataataacaaattcatgtcagtcccgaaagatggttaattcgaacagcatcgccgaagctagtcgataaaacagttgatgtttcttcatcaccctgaattgttattataacagagaataaaagtatgaaatggaataatataatacacccaactgggtagacattattccacttgatgaaaagagaaagcttcgaaaagaagataggtgtaataaactgttaaacattaggaaatgaaagattcaactcaccttttataataaaatttaaatgaaaaaaatttcaattgaaaagtcaaattgtagggtttctctcttacaaggaatggtgttattacgaactattacttcttttattttatatcccaataataattttgtatttatcgtaacaatttgtaatttaatgactatacaattgtaaatattattattttaaaagctagaaaagacaaaatttagaaggatataataaaagtaaaatttagagaaagaagattatttaatgataatttataatcaatttatagatagaatattgtaaaatttataatataaataacaaagattatatttttgaaaaaaatgatatttttccattaaacttagatcatcttcttaactaattggttgatgtattcttctctgttaccagtagaaccaccttgaacgaaatgttggaactttcttctaacaccccaaccaccagatgggttagataacttgaatggccataagaagttgtttgcttgtttaaagtttggaccaacagtgtagatttcatgaattaaatcttcaactgattcaataccatattgacctaatgatgcttcaatgatagcattatcagttaatggaattctttgtttgttaaccttaccgtaacctctcttgtaaactaattgtctaatagttgataatgatgggtaaccaattgcacaatattgttcaactaattttaataattcagtagttgccttagtaactctaacgaaaacacctgcattaatttgggttaatcttaataattgaaaaacttttcttgactttggtggaattttcataatacccttaattctaacaacaaagacaactttagcttgttcttcaacaaagtatgaaccttcagcctttgctgctctcttagcatcaatgacagctctttctgctgctgcatattcgttaacatatgcttcagttctcttgtaaagagcagctctcttttccttagaaacctataataaaaaaaaataaaaattttttttgttagtaaaatgtttttttaaatgatattagatgtattcaatatttcaattttttatttagcaaaatttccctttctttatgtttctcagccgaaagatggtgttataacagacagcatcgcattcgctagtcgatataggagacaaagatttcatcataaatgaaacattttttaagaaaaagaaatcatgaaataaatgttaattgaaatttgatgaaatagagttaaatacttacaatctttcttgcttttcttgctgctgcaacttctttagcgtctctttcaactctctttgctgctttaacttgagattctggtcttggaatactatattaaaataaaggtgaataaaatttttatgttagtaatttgttaaaatgtaaattaaaaatagagttagaactctaacttctaatgattaatctatattttctccgagtcaaaacaatattctaagaactgattaattccaatcattcaaagacaagcttgtacacagaggaaatatatttagtctgaaaaccatttattgaaataatatcaaaaaaatatctgtttttttcatttcaataaatagtgaaaacaaattgggatcacccaaatgtatttaaaactatatttcccatggaataattttaatcatgacggatattgaacaataattttgaacacaaaattaaagtaacaatcaatcacataatgacaagtctgctgtaaagcaataaaaatttgcgggatcaaacatatcacaaaataaagataaaaaaaatcttcttaaggattatgctatagtagatacccatttgttggagataataacgagtgaatggaaatatagtaatattaaacaaacatcttgttttaatcccaaaacgtccgaagacataattaaagaatcaatcacatttttatagagctcgattagattcataagctcttgataggaatattaaagaaacaaagtaactgagaatttattcaaacaaagtaattcaacaaatgattaacaagacttgattaatgatcatagaagatatattaataagaaatataaacataccctgccattgtgtcttgtattaagttgttgtttaaaggaaataaatcaaaagagggaaaagttaaagttaaaatactagcatataaataactaataactgaaaaactttatcaatttaaataaatgagaatgctagtgaaaaattagaggaaaattttaaatttcaatttttgcgcgtcctttcccaaagcggtaataagggttgtgcagggtttcccctatttttaatcctcgctttaccttccctattgggagagatagcaaatatttatctctttacagtaatatgaacatgttttttaggattttaatagcatctatcaaagaattttagaaaacataatacaaaataatacaaaataatataaaatcaaaatagaaaaaaattgtcagttaagtttagactttttcatctgagtctaatgcttcatcaatactaacaacattttcaacatagttatataatttagcagtttcctttgtaactctttcagtcttgtaatataatttataaccaataatcataataacataaacgaaaacaccaatatatgatgtaataaattgtttatattggaaagttggaataaatgcattgtaaccattaaagaatgtaataatacaaaggaagaaaataccaatgtatgcaggataaggttgaaaccaaattctaaatggaatatcttctcttggaaccttttggaaaactgtagcatcataataagtaatataagcaattaaaacattaatccatgttaataaaccaaaaactgaaacggcacctgaaaagtaaccaaaaatagttgctgatgattctttacaattcatatatgctaataaaccaaataatgcagtaaataatgatgcatagtatggattaccatttctatttaattttaagaaaatctttggtgccataccatctctagctaaaccatataatgaacgagatccaaggtaaacatcatgaattagcagcaccaccaacaaagaataaaagacatgcattaacaaatgatggtaaaactttaattgatgcagtttcaatagcaatgacaaaaggtgcagcagctgcatttgaagcagtacctaaattaggattaaatggtgaaacaactaaaccaatgaggaaaacacctaagacatagaacaccacagattctatagaagacttgtctggtagcagatgggactaacagtacgtaggatctggtgcttcaccaaagataataccaatacattcacaaccagtgtatgcaaagatagattgaataacacatgcccaccaacctaaaaatttacctttattaccttctaataaatattcaacaaatgcttctttatgccagtattggaaaccaacagttgtatgatttggtccaccaccagctgtaataacaatacttgtaataaaacagatagcaagagttattaatttaacaacagatgtccaaaattcaatttcaccataaacacgaacattaaaccaattagcaaatataataacaacatagaaaacagtaataaagataccaggatttaaatcttttctccaaaattgaataatcataccaagagcacttaattcagctggtaatgtaatagcataagtaaaaaaataattccaaccagcagcaaaacctaaagccttatcagagaatcttgtacagtaaccagagaacgctttatccataggacagaaagcagcaagttcacccaaggagaataaaacaatcataagaagagaaccagtgaatgtataaccaataaacaatgaagctggaccacctcttttcaaagcagtaccagaaccaataatcaaaccagtacctaaagcactggcaaccgccatcatactgacttgtcttgctttgaaatctctcttcaagacttgttcatcagtactttgaccattttgatcaattaaaattgaacgattagaatccagtggttcaatattatttaaaccagaagttgattcttcaactttactactaacatcactacccttttcaccttttttgtaaaaactttcaaacattattgatttgattcgaaagtaggttttgaattgttaaatgaacaaataatttaatttaatttaatttaatttaattatggttcatgctatcatacaataatgtggggaattagttatttaaatatgattttggatgaattatcgtacaacaataagttaatcctattttctgatcattataatcaaacttggttaattacaagataagataagataaagataaggtaacgatacaagatatatgaccagaaatcaatgctcatctaaggcattaaagaaggttaagtttacaacattggcatttatcttgaacaactttgaattggtgacaatcaattggcattgactgaaaactttattaccaaaaaaggaaaatttggcattataacagaaaaaagaaatttaacatggtgtttgaattaaaaaattaatctaatcggagtcaacatataataaatttaacaataaattattaaccactcatgagttatcgattaaagggtatatggaagaatcaattcacaataggcataaaaagaaataatcgtgaaatttttcattcaataaacaatagaatatggaataaatgatacaatcaatgtaccatttacagtttccgcctcatccacctacaatatctacactatctttaatcggattaaaaagcggcattacatttattatacattataacattctcttaacgaattgatattatcccacttttaactgtcaaaactatttaatatgcaacccttctttacatgtactttcggcaatgaacctacaaaactcaacgttatctgcactatctactaatcgtaataacaatctactgtaacagccatctatctcccacaactaacattcttctctataagatctggagatacaccccactttatcaaccgcaaaagcaagaacaaagccgtattagataaccacttgataaccaaccggcaatgccatataaaaattgaaaaaatgtagccgagcgctttacatttccattaagtggttaagtaagcatagcaagattctacacggcattggttaagtctccgttgaatctctttacgtaaatttatcttctttgttatcagatgatagggtctctacggtaaccgaataatcaaggatcagagtctaataatagctaataagataaagcagattggaatccagtttgtttgttatatagaaaaaattaattaattattatatcaaaaaaaggcaagtaattactatagttagtattaatctaaatatacgcttaaaccttttcttctgattctaatgcatcatcaatactaataacgttctcaacatagttatacaatctagcagtttttctagttaccctttcagttctgtaatataatttataatccaaaaatcatgataagataaacgaaaataccaatataacaggtaataaattgtttatactggaaatttggaataaatgcattatatccattaaagaatgtaataatacaaaggaagaaaataccaatgtatgcaggataaggttggaaccaaattctaaatgggatgtcttctctaggaactttttgataaactgttgcattatagaatgtaatgtaagcaattaaaatattaatccatgttaataaaccgaaaactgaaactgcacttgtaaaatatccgaaaatagttgctgatgattctttacaattcatatatgctaataaaccaaataatgcagtgaataatgatgcatagtatgggttaccatttctattcaactttaagaaaatctttggagccataccatctcttgcaagaccatacaatgaacgagaaccaaggtaaacatctgaattcgcagcaccaccgacaaagaataaaagacaagcattaacgaaagatggtaaaactttaatagatgctgtttcaaatgcaataacgaatggcgatgctgcagcattagatgcactacctaaattaggattcaatggtgagacagctaaaccaatgaggaaaacacccaagacatagacaccacagattctatagaagacttgtcttgttgcagatggaataaccttacgaggatctggagcttcaccaaagataacaccaatacattcacaaccactgtatgcgaaaacagattgaataacacatgcccaccaacctaaaaacttaccagttgaaccagtatgcaagtattctaagaaagcaccctcatgccagtattgaaatccaacagttgtatgatttggtccaccaccagctgtaatgacaatacttgtaataaaacagatagcaagagttattaatttaacaacagatgtccaaaattcaatttcaccgtagacactaacattaaaccaattagcaaacacgataaccacataaaagaccgtgataaaaatacctggatttaaatcttccctccagaattgaatgattaatccaagagcacttaattcagctggtaatgtaatagcataagtaaaaaaataattccaaccagcagcaaaacctaaagccttatcggagaatcttgtacagtaaccagagaatgccttatccataggacaaaaagctgcgatttcacctaatgaaaacaagacaatcataagaagagaacctgtaaaagtgtaaccaataaacaatgaagctggaccacctcttttcaaagcggtaccggaaccaataattaaaccagtacctaaagcactggcaacagccatcatactaacttgtcttgatttaaaatctctttgtaaaacttgttcatctgtagtattaccgttttgatcaactaaaattgaacgatttgaattaagtggttcaatatcatttactccagaatttaattcttcaactttactactaacatcaccacctttttcatcatcttttttcttatataaactttcaaacatttcgtttttgtttttttgtttagttaaagaagtttatattatatttgtttattcatcaggttgggggagtggaaatgtaaataaacgtcaggtatttaaacaacattttgactttaatttttcactaatatctattgttaactgataagatgagatggtggagggagcagatgagatggtggagggaccagatgagatgatggggggagttaatgaaatggaataagaatatgagaacattagataagataagataagatagaacaaaatactaatagaataataataaaaatgtaatagaataaagtgaaataacaataagataagataagataagcacaaaatacttcaattaatgttataatgccgcctatttgatataatataaatgtttcatttgctcaaagataaaacaatcaagaacccattactcggttctatcccccagttggtatttatagttttcagattgatattgataataatgataacaagaagataatgttaagataatggatatagataagatggtggggggagttatttgacatgtgattacgtaatgatagaataaattttttgaaaatttcaggtactaacactgaacagtggaatttactgccattaacttaatatactttcatttggataaacaatatctactatcaccatcaggtatgagtgccgctgctatagttgctaatagaggtgtctttcttaatggtatgttggtttcttatctctttgtatttcaatagaatctttttatactaactttcattttattttttatttttcattttagatactgaacctgattataatcatgtttccgatcaagaatatgtaacttttagaaagaaagcacaggaagcttataataagagagcagagctttctcaaaaatcacaaaatgcttataaacaaggtgataaacaaaaagcacatgaattatcagttgaagctaataaacaattagcaattgcagaacaatttaatgcaaaggcagctgaatttgtatttattgaaaataataaagattctgatgataatgatattgatttacatggtttatatgtaaaggaagctgaatatattttaaaacaacgtataataagtggtattaataaacaccaaccaacaattgattgtatagttggtaaaggtttacattctaaaaatggtgttgctaaattaaaacctgcagttgaacaattatgtaatgatgcaaatcttcgttgttgggttgataagaaaaattcaggtgttttacatattgatattcaaaatgctcaaattcctcaatcttggtataatattaatccctcaggtattggtgcaatggatgatacatattatgcttatcatcctaatgaaaagcctaccaataatcaaccatatcctcaaacatatcaaccatcctatcaacctcatcaacagcaacatcaacagcaacaatatcatcaacaacctcatcaacaacaacaacaacaatatcaacaacagcaacaacaacaacaatcacaaaatacagattttgccatgtgtctctttggtgtatttggccttcttttcaagtcattctgtcgttgatcttcttctatatatctatccttttaacactgtaacactatataacactttaatcttactgctttgtatcatatcatattatgtaagcaccatataaaagtttccctaattgagacattgttaaattttaacatgcaatttgatcagccttaatcagtaagtgtatcttttgatattgcagtatattaatcattgctaaaaacaactaataatgtccggagaactgaataggctaaactcaacgtttaattccttttttaatgttatccgtatacccaatactggtaatgcaacccatgatgaggaaactccaataataaatgaatcaacaaataataataataatatacctgaaatgcctggtgctttcacattccctaatgaagttaataatgatattaataataatcaaaatacaactccaatgtccaactatgtttcaaaattctttgatagattgataacgattttcattgtttcattattcctgattgtattcatcccagtatatgtattttatcgaatagtattatacgttttctttatactactttcaatacttgttaaatttaatagacatggttataaaaagattaataataaacatcctgcaaatactgcaagaaaatttattatgaaatttgatgaaaggataggaaataaaagtaatgtatattccaatgataatggtgatatgattagggatgatataaatgctaattcaggcttatcaacattaggttcagaaaatgagatacaggaaattggaagaccagattttttagaatgtgcatattctcatgctttatttattgttaaaaaggaaattaaatggctattagtttatattgaaagtgaccagaataatgatgcaatcaattttacaaatgatgttttaactaatgaagaatttttaacatttattaaagatagaaatattttagtttggggtaatgatataagtgaaagtgaagcatatcaaatttgtaatcaatttaaaattacaaaattaccatttttaggattattttgtttaactgttaatcaaacaccaacaacttcaggtatgagagcttcattaccttccttatcattagttatgaaaattcaaggttataaaactttagattatacattaaaaaaatttaatcgtgcattcaataaatataatcctgcattagttcaattaagacaacattatactaatagtgaaggagaattatcatcatcagattcaattcaacgtgcatatagacaatttagacaaaatttaaatacacctccagttataagatcattagagagaaataataatgaaagggctaaattacaatggttaaaatggaggaaaagtagattaatacctgaaaataatattgatggagaatttgcaagaattgcaattagatgtgttgatggtacgaggaaacaatataaattagataaacattcatcaattgaggaactttatgctttagttgaatgtactatattgaataacattgaagttgatgaaaatgaacaatatcaggaacctgaaaattattctcataattatacatttgatttaattaatgttctgcctcgtgttgttatacctataagttatcaagaaagtatagaagaaaatgaatatttatatccaagtggtaacttggttatatcaattcgagaatgaagttaataaatcggatatatactatagatgatttataatgtcttttgtaaaattagattagcaatttgaattaggtttgatttaagtttgatttttttaatttatatactactatacatgatgatgtaaataagcaacaattatgccttctttgaaactttcttagccttcttctttgactttggtttcttctttaatccacttaaaccagattttaaaatatttgtatattcattccagaatgaatctaaatttactggttcaacaattgtacttaatttaattttctttgatttatccttattaccatctgttattctaataagtattggatatgatttattagttgatttattttcatggaaaattggttttattttatcattcaaatcactaaatggttctacaccatcgatttcatcatcaagtgaatatgaatatcttttttgtgtaatatatattgatgatttaccatcatttttagttagtaatgatgtaacttgtttgaaaaactgtttaaatgttaaatgttagtaaaagtttgaacatattgataagagtgtaattaattttgaacaatacatacctcttgattatcctagtactagccattatctaatgtaatctgtgattatttgaacaaagaaataccatttcctttaagactgtaatgatctcatgacaatgtccaaaaatcatgttctcaacttccactgttaaagattgaaaaaaaatgaaattggtgagaaattcctataggaagattcgaattggtgtattacatttattaaatactaaaactacatactattatgctttacggtaataactatacatatcctttgcatatccgtaaggtaaaccaaagactgaatcaattgcagaaactatatttccactcttaatatctataatatcactatctgatatcttttgtggaattgaaccaaatgcaggtgcaaattcaacagagagtttatcatcatagacttgataatgttgacacatacttagcccacaaagaacatagtttgtatgataaaaatcagcactacatccaggtttatcacgtaaaccaaaattatcttgacaacagcataaaatatagttttgtaatttttgacgatcacatattggtataaatgtttttgattttgaattgtaatttataagagtttcaattaatgcacaagtaccaccaatccaatgactataacaaccatcaactaatttatttgtacgaccagagaatcccccctctaaattgtattgtctatcaacagtccattttattaaactatcaatatttaaattagattttaatattttatcaggacttgttaaaataaacatagcagctaatgcacaaaatgtataaccaccatgtgcttcatcacctggttcaccagaaaatcctccttcatatgtttgacattctattagccaatcaaatacacctttagttatatcatcatctaaaatgtcaaaaatttgagctatacataatgcacaataaactgctcttgtatctgattcaccacctttatgcataataaatgatccattaggtaattttaattctaataaagaatttttcaccttagtaggatcaatttgtgaccatacattttgatctttagttaatgctaatgttaatatagcggcataagatgcagctaaatggaaaatctgatattcaccaccaccaaaaccttgatatttatcattattatcatttatattggtattaagaattttaagtaaaagttttgaagcattttctctttcatttttagataattcagtttccaaaagaatacatgaattcattaaccaataagcaatccatgtcttagatgcatctaatttagaaaacattgcaggaagtggataagctataacaccatgagtaaatgatatatgtgcttttttatttaattttggaaatgaattagaaccttcatttaatatatcttcataaattgtcaatatatcgacttctgtttccattttcttttcaattgtgcctgttaatttttcacctaatggtgcatcacaatttgagaatgaatcataactaccatttagcatttctattaatgtatcaaaatctggtattttaattgttgtatcagtaattgaattccttattcctgaaaattcgtcaaaagaagtgatattaccaataccatttgcttcatcatttatttctgataacttactactcatcttatcatataataatcatttaccttaatcctctatcatataagtaataaaaccagcaattgaacaggctcaaataggaaacttccaacaataaaacaagcaccatgacttaccgacatgcgaggtgttaattaaaataaaattgttaaaatgtccgaaaaaagacgacttttctcattttgacatgaattttaacaattttaacaattttcaccattttttcactgattgtcactgattggtattggttttctattggtagtatatagagatactagagtaatatatagacaatgttcagtacactgaataaacaaccgtttggtcaacaacaaccacaaacacaacaacaacaaacacagcaacaaccatttttgagtagtaatacattaacatcacagccattccagcaacaacaacaacagttacaacaacaaactcaatcaggatcattgttcataaatacatcaaatattccagttgttgaagagtcaagatttgctaaatatcaactgaatgattcatcaaataatcaaaatggtcaatctgctacaagttcaggaacttcaattaatgaatcatcttcatcaaaacataaaattccttcacgtttaattaaaagaacaaataaagttaataataaaaatgaagatgataaaccttcaattccaatattaccatttaaacaatcaactcacgtacaagaggatacatttaatgaagattttggttatttgtataaatatgataaaccaccaacaaaatcattatttgatccttcaaatttaaatgatgaaacaactacaagtgaaattttaataggtgattcagttttcaaaaatatgacagataatccgcttaattttcaaaatgttttcaaaagacctgaaaataaatttaaacctgaaattgattcaattactcaattaaataatattaaccttccatggtcaaatgatggtaattattatgaagataataaagatgaaaatataaattcttttaaacctcaaatatctcaaaataaatcatcatatagaaattctccttcaccttcgtttataatgaaagaaaaattatattattcaattatagtatatggatttgatgatagtaatttcccattacttgttgaacatttctcaaaatttggtaaaataatggaagatttaactatatctgatggtaattatcattatggatcattaggtaatttagttgcacatgataaattagttgatccaaatgataataaaattaatgatgaagataacaatacaaaaaatacatcaaaatcttcaagaaatttaaagcaatcgtttaataatcataatactaattctaataataacaaaaatttaaataaaaataattcaaattttttcccaatttttatgggtcaaggctgggttaaattaacttatgataatacaaattctgcaattagagcattagcggaaaatttaactaatgatggcacaggtaatattttaggtgttataccttattcaaaggaagatttagaaattttaataaatgataaaattagtaatgatttagatattggtaatggattacaaggtttaagtaatgatttagatattaatacagttcttgcagataatgaaattggtagatacttattatcacaacgtgaatcaaaattaaataatgaatcatcacaatcaagtaattttaataataataataataatggtagtagtaaacaatcaaacggtacaggtaatataagaaatggttcaaacttaatactgcgtaatcaaaaggaaaaagatgccaaatcaatttggaataaaggtatgggttttatgtttggtactggtgaaatttaattaataatttaaaatatgatattaactcattccattttagttttaattttaattatataagaaaaaagcggtgaatgtaatattttgtataaatatatacgttgtcattaagtaaattaatcgataagttagttaatcaatgtttaattttttttctaattcttcattcttcattattgaataatgatccaagacctccctgttctaatccatcaacattatttttctttctacctcttgatgcaccttcaatcattttattacgttgttcaagatatgaatcacctgatccattactcatcgcattggcaaataatgtcagtaaacaattctttctctctcttgatctttgacaattaataaacagattttcaaaatttgttatagtttcagtattaacttgtaatttttgctttaataatacaagtggataatcagatttaaatctttcacccgcatataaaattgataatgtatatgcagtctctgaatgtgcatctgaataaaatttatcaagtaaaacatcaatcaaaattggcataatattttcatttataatcttatcaatttgatcattatttaatgcaatcaattcttgagataaatgtcttaaaattaatactgcattaaacgaacatcttgtatctctaaatgcaattatatcacaaactaattttaaatatggtattaaaacttcaaatttagtaagcataaactctctggcctgcttttgtctatcagataatgaacttcttggtttttgacctgctatatcaatcaataatctagcagccatttgtgttaattgtcttaacatatgctcttctaacatttcttcgcttaattcttgatcagattctgtaacatcatatctaagacctctttcataaataattttccatctttcatttaatacttcatcaagtgtattgaaaacttttggtaaaaaccgagttaagaaagaatcataataacttactgggcaatttttgaaaacaggtctaacaacttgattaatcatatgtctccaagaatgaagtgtaataccaacagattcatctgttaatgctttccatactaaatctgcattcttcgtatctatatataatgtatcttcaagttctgaaattgtactaatcattaaatatgcatattctctagtgtatctgattatatgaccaagagaatctgcaaaatctcttaatgtattcattgcttggtaattttcatctaaaaatgattctcttgattgaattgaaataccttgttgccaaaatctttccattgtagtatatttaacaaatgtttgaacctctgctggtaaacctacccaatttgcaggattgtgatatgcttgaatttgataaattaattgataaataaatggtaaaattggtttaactcttggttgccataatgctaataaacttttataagtatcagatccatgatctaatttttcaatactatattgaatcagaattctagttgaacgaattggaaatgccgttgaccattgttctttaagttcctttttaagttcacgtccacgatcatccatatcagcttgtagtagattagtatttgcagtaatatttcttgatctaaaatattccgcaattttaactatacctaatctttccataaaccaatgtaaatctgataatccttttaaagttattggattttgccatgccattaattcaggatcaataattttactaaaagtttcttccttattacctaatgaagatctttgggatacaactaataaaaatgatttgaatgcaactatttcatgtgatattaattgattttggcttaaaatattttgaatgacaacttctaattccccataaatatttttcaaagattcaggcatcaaatatgctaatctatttaactctgttccacttgacgctcttaaatctctaatattttcataatcttcatcatctggattttctggatatgggaatatacaactatcaataactctttctaaaactttgaacatggtcgagtttacatcttttaataaaggagtgaactgaactaaagtctggatttgttttcttactaagacgggatttttaatttgtaacataatcaataattgacacaaattatcagcttgttcagttaaataagttttaatctcgttcatatcatcctcggtataccaaattaaccatctagttatacctctaacacatgcttcaataattgtaaattgagaataggcaaagatataaggttctgaatgtttacctttaaaaattaattttggaatagataaactttgttcaccaagtggagatgaaaaaaaattattaagtctatcagctaaccaaaccaatgaatcttttggcattttacaaacaatgattctaacaacatcatcatttagttttctaaattcactcaaaaatgaatgtttatcggaatcattatcaaactcatgtgataaatatttcaatggagttgattcaggatctaaatcattatagttgactaatttatttgaagctatttccaatagttctagatcaattgattggaaatcaggcatatcacttaaatcatcgtttcttaacattatcccccaaaattgaagagaaattgaactaatatataatgcttcatgtttagtagtttctagtactaatttataaaaattggttaagtctctattttttgttttaattgaatttttacttgtaatgtattctgataatatcataataaattctactatttttttcaataatatgtaatcatcatcgtctatatcatcaggatctaaatttatgtatttgaaagtttcaaataacaattcataggatttatcattaaatattgaattaactaaccattcattatcttcaacattggaatatggtttattatataaactatcaaaacattcaatagttaataatttaatttttctatcatttatagtaagtaattggaacaactttgtaattatatcaacttctcttaaggcagctggcaggatccaaaataatgaaattttgaaaatgtctaatattttgataataagatcggtatagaattcctttttatcttctgtactactttgttctgtgttcatattattatcaagaatattattgttattgttactattgttgttattggtattattattattattattattattattattcaaaagataagtcattgcttcatctagcaattgacaccattttatcaaccaaccttcatttgatgatacaaacaatctaacagtatcatttggctcaaatttggaagataacactctttctgagacgacaatttcaggacaaagtgagatcaaaacagttcttctctttgaaacaattggatcatcaactaaataaatatcttcaaataaagttttcattattaccagtgataaatctctagttatttgactatggttccataattctaataaatttgaatccattaacatccaagaatccaatttttcctcttctgtaaactgtactaattcattattattattatttggagagttggaatttggtgttgatatattattttcaatattatcaatatctatagtagttgtgttattattattattaatattactattatttggatgacgttgcttcaataaacattcaccccaacatcttttagcgatttctacccaaagaaatgcaattttagatcttatataatgaggatcattagttgaaattttagttgcaagttcaacaatccaatttcttacagctaattgtttttcagtatcccaaataaaataataatttgtaatcgaatataataataaattaagtgcataatgtcttacaatattattataattattatcacttatagctaattgataaccccaaaaggggcaatcaggtaatgatttaattgattctaaaaaatcctgagcctcatgacgttgatcattatttgatgcaggattatagatagtgtctaatgagactataatttgattgattccctctactgacattttaataatgtgtgaaacggtttaggtgatatcagatagtatatcctaggataatcaatgttcaattgtgtataataaaatccgaaagaggatatacaatcaaaggaatgaatgcataaacatgggtggcaattcctcatcaaaaaaatgcaaatcgtaacatttactcagtgagggaaatttcattttttttttacgttttcaatataaatttattttaagtatgacgagtgatacaattgaagtttagttagatagtaagctggactctgttggtacaatgattagggtaggagtatcatctgtttatagagctaatgtgaaggctttatgtggaaatagatttggaaatggaaatgtaaatagaaatagaataacgccccttgcattatttccattgagaaattatgcagcttatcctcctaaaccaccaaaatttaattttaaatcaaagaaagaattgacacctgaagaaactaaagaacttgaagatgaacgtaaatataatgaagcagttaatagtggtatatggattaagaagtggggtgcaattgttggttctaatgcatttaataaaaaagcaactaaatattatattttactttatgttatattcttatgttatggtatttattatttccgtaaattatttgcaagacatttagaagaagaagatttaaaaaaattacgtgatgaaggaaaagttcaactaactgaatatcaacagttgagaattagagatttatcaaatgatttattaagaaccaaaaattcacataaattaaaggcatattataaattgaaggaagaatatgataataaaagtgatgaagagaaggcaaaagctggtccatttgatccaaaacctgaagatattaaagatattgttgatttaaaatatgaggaatgtattttaccaccaaaagatttaagttcattttatgataaattagctgatgaatatgatagtgatgttggtacagaagaaatgatgtcatttatgaaaagtaagagaaaatgggttatgaaacatgttaaaggtgatgttttagaggttgcatcaggtacaggtagaaatatcgattatattgatccaacagttattaatagtttaacatttttagatgcatcaaagaagatgatggatatttgttatgataaatttcatgataaatggccatcatttaagaaagttaaatttgttgttggtaaggccgaggagttagttgaattatcaaataatggtagtaataaaggtaagaaaacttttaaatatgatacaattattgaaacatttggattatgttcacatgaagatccagttaaggcattagaaaatatgagagaattacttaaacctggaggtagaattattttacttgaacatggacgtggtgaatatgattttattaatgaaattttagataagagagcacataaacatagtgataaatggggatgtcgatggaatttagatattggagaattagttgatgcatcaggactagaaattactgaagagaagagagctcatttaggtactacatggatgttagtttgtaaaagacctgaggatgcacctgaaattgatgaaatttcatttgttgaaaaataccttttcccaaagagaaccaacattgattcatccaatccagttattaagaactagtgtaaatgatatgtaactacaactataactatataatctaacttactgtacataatgattgatatataaataaaataccggttataatagagtacttttatagtctatagccgattaaaacgcgggaatttaaaagaaaaattcaaatttatttaaatacctgcactcttccactatagtagacatcatctttatatgggatatatacctgagaacatacttgacaatgacaactagacgtgctaagaaggtgtcttttaataagagctctaaaattgtagagattggtcaagaggaagatcttaataaccttgatttagagattgaaaatcaaaattcatctagatttaataatgataagaataatgaatccaataaatccaataatgatgattttgatgatgattttgatcccgatacaatggatattgatctaacgacggggaaaaagagaaaaggtagagccgctgctagagctgatgccgctgcaggtactgctgaaactgatgataaagctccagttgaggcacttgcaacttcattaggtttaatcccttatcatttaccattacttttatattcaattttatctgatggtacaattatgaatgatacagcaaaggcaattcaaaaaactttttttaatttaattgcaattgcattaatttattcagttttagttggtgaaatggctaaattacaaagaaatccaaataaaaaatcaagtggtccaacaggagctgaatttttatatacttcaatttcattcccaatttcagttgctttatcaattccaatctatcttactttcctattatttggtgctccagctggtcctttaaatactttaacattctatttagctgctcacgtttcattaatttcttttttcccattattaaatgtttacaaatttactgataaaaatgcaaagcaagtctggtggaaattacttactttccaagtaccaaattggaaattaaatcaaatttattgttcatcacttggtggtttaattggttgttggttaggtgtcattccaattccacttgattgggatagagattggcaagattggccaatcactcttttgattggttcctatgctggtgcttttgtaggttcagttgctagttatttatatggactttacgttttatctaaattcaagaaaaatacttgatccacagacataatattcaccacatactgtcatatactatactatactatatttaatttacatatactttcctatttactttaatgtaattaccaaaagctatactaattatacagaatttaccatgtcttcaacagtgacgcgtaataatactctctaaaattttgaatgattttcaaattcatgcaaatttcatttactttcttctactgacaacacacttactaaggcaatgtcaaggagaagagcaagagaagagtcaggtgaagcagactatggaacagatttatcatctgaggcaactttaagatcagaaaaaagagctagaagttcaggtgtagcctcagctcaaatttcaacggcttcaacattatatactgataatgcctctgatacatctaaaaaacttgctattgctacatgtagagttattctaggattttctaatatgaataaaatattgaaaaaatctaatattaccaaaatcattgaagaagagaatgaaaaaggttcaaatgttcaatttaagaaacatattatgcctgttttatctaatatattgactgatgttttcaattatgatattgttgagttaccttctaaaaaaactatgcaatcagtctctattgtgaaagaaaatgctaatggggactcaagtaaagtagtgaagtcaaataatccgccatctgatgaatttgttttagttaataatttaccaccatgtttacgtgcattaaattattctttcctagcagattatacaaaacctatgaataaatcacttaagggaatggaatcaactaaagttggaaattcgaatatatccatatacggtgaaaatttaccaagaccaacaactaatattattcaagatggtatcaaacttttaataataagtattgttttacttcataacaacaatattttacaaagtgatttgataacaatattaaagactaattttgggtttaattttaaagaaaaagaatccgttccaatatttggtaaccaaaccttgggagatttccttacaatgttaagtaaacaagagtaccttgaaagaacattgataacagtttctaattcaggtaaaggtgcaacacagagaaatatcaattctaaaaatgctagacatgaagataatactctaatgattaaattaggtagaaaatgtgttgctgaatggagttctgcacaatttgtacatttattacgtcaaattatgcaagataaatgggatcctcaattacaagagaatgcaatatataccgttgaatctgtatggaaagagtatgatgctatgatgcattcataatcatactttatgtctattacctatataataaatatccttctgtatactataataaatcaacctacttcactttaagcaacaacccccacccctctcccccacaaaaatgactttttcttccattttccctgcattgataaaatcagttgcgtatacactttgaatttggattgcttctttttcttttcaatgttacatacttctattctacatgcccgatactacctcttcagtgggggttttcggatactctcaatcaatgactgataataatgacaattctaatgataatttattaattactgacgttgatgattcacttttaaatcaacaacatggtaagaaaaatgctaaacgattggcacttctattttcatctattgcagctttagcttcaggtaccccttatttatatggtgtatattctcctcaattgatcagtaggtgtggattttcagcattagattcgtcttatctttcatttgcaggtaatataggctcatcaattggtggatttttcgcaggtttaatcattgataagtttggtgttcgtgttggtctattattaggggcaattttacaatttactgggttttttcttttctatatcagttataaatatgcattacacaattttgttcaattattattctcaatggtttgtattggattaggttcagttttagcatattttgcaacaattaaagttgcaacttttaattttccaaaacatagaggggttgccaatgctttcccggtaagttcatttggattggctgccttattctatgcatttgtttcaacagtttggttttctggtaatactgaaggtttacttaaatttattgccttgttttcaggtatattgattacattttctagttttttcatcgaaatttatgaaaataatgaagatgatgaaaatgatcatggaactcataatgattttgaagatgaatcatctgatgaaaatgaatttgaattaagcatgaagtatttaatgaaaggtcatcgtggttcatttgctcaagttaataatatactacggaatgattcatcaagttcattattctcggatatctccgaagtttcatcattattaaccaactcatctacatcaatttctagagaaccatcattgcacagtgtagcttcattaaatccaatatcaatcaatagtcaacaacaaatgttaagatataataataatatttcttcatctccattagatttcaaagtaaaacaatcagttccaagatctgcatcttttagaattgcaagctcttttagtagctcaccaagaaactcacgattatttggtagtgctactcaaaaatcaataaaaatgccatcaactgaagaatcacctttagtaacgacatcaaatgatgctattgctacaactcctaccgctccctcatatccttcatcattgaaaactttagcaagttcaactaatttacatttttctaatcacaacaaaacaccatcaaatgattttaaaaatatggtcataagtgaacaatcaaataatatccctacaggtttaacttctgattcattaaatcaagttaatccaaatacagcaaaaaataacagtttcactgataattctgaagcctttactaaaagtttacaaactgttcctaaaaggaagtctagaaagaaaaagaaacttacaacaaaagaacatatatctcaacttttctataacaaattatttacgtcacattatattttgaatgctttctattgtgcaattggacaagtttatatttatggtattggtttcattgttcgtgctcaagttaattattacagaacacataaacctgaatcaatattcctcaaatttgccatttatttatcaaattcatctgattcagcccaaatggcagttgcatatcaagcattacaagttagtataatatcattttccaactttttgggaagattaatctctggtccagcatctgacttggttcataaaaaactcaaacttagtaaaatttatgttgttataatttcattaataattttattttgtggtcaaatgtctttaattttttgcaataaacttgaccttttatcattaacatcatttttaattggattatcatatggttcaatatatggtactatgccatcaattgttgcagattcatttggatctacacattttgcaactacttgggcattattaggtacgggaccaattacagtatttttaattttgagtgattattttgggactgtctatgattcacggagtaaatggtttgatttagacgataagaaagttaaaatgtgttttgaaggtagaaattgttacaaagatgtgtttaaacttaattcgatgatttgtggagttttatttttaggttatatttggttagtaattgtttctcaaaagagagaaagacattaaaatgtataaattctataaattttataaataataatatatccaaggacattcaaataagttagaagacatatataccaatctattagaaaaaaaagcattttgagaaaagtacccatttttcggattttcaatttttttcatagcaaaaactctctcgcatctcgctttgtattatggagagaggtagagagtagttcaccaacttgtaacattggaatgaatacaattgctgaatataagtgttgactatttaactagtttttatagacagtattcaatacacaatccttccatctttgctggaaaatggacgtgtataatcagtttctgaatccaactacttctcttttcagtctttactgtcatttcactggagaaaatgatgataatttaattgtttccaagggaaatttacttcaaatatttaaaattattgatgttaataacattgaatcaactgaaaaatcaattaaattaaatgatactcaaaacaataaaatcaattcagaaaatggtaatacaatactggatacattaactaatgaagatttagcagttgctgaaaaaatcaatatgccagaatatgaaattgaaaaggatccactatataaacttattctagtatctgaatattcattaaatggtaaaattattgatgtacatacttttaggccatctaatttaaatgatatatacggtgaaactgataatttagataacaagagagctaaagttccatgtaaagttgattttttaatagtatcaactgaatttgcaaaattatcaattgttaaatggaacccttcagataatttggtcagtgttgttagtttacattattatgaatccttattggactcattatcaatggaaaaattgaaaacttcagatgttattcatagaactgatcctaattttggttgtactttactacatgttaatgatttacttgttttcttaccatttaaaaaaaatactgatgaagatgatgatgattacgttgatgataatgatgattataatccattatcaaatttgaaagatactcctcaaatagttctatctgattctaaaattagtaatgatttttttcttgaaagttttataattaattcgaaaactttacatccaaatcttaagaatattgtggatattcaatttttaaactcatatagaaatccaactgttgctattttatatgctcctgatactttatcctggactgggtttttacctcaagtaaaggataatatgacagtaatcgtattatctctagatcttgaaaaaaagactgctgatgttattatagaaataaataatttgccatatgatgttgaaagaattgtacctcttgataaacctataaatggatttttgttgatgggatcaaatggaattattcatgttaattcattgggttcaccaaagggtatgtatgttaatgaatttttcactaaaactagttcattcaatctaaaagataatagtgatttgaatttgcttttagaattatctgaaataagtcaaataagtgatgatgaagctttgttaattaccaagggtggtgttttttatactcttatatttgatgaaattggtggtgtttcaagtttgagtaaaattaccaaaaatccagaatcttcttattctgatattaaaatatgtgatgttttacatattagaaatattccacaaaaaaatatgatatttgtttgctcacaaagtggtgatgcaatgttacttaactgggatttccaatcaaaatcaaaattagatacgtcatctaaggcagatatagcaaatgatattttcgatgaagatgaagacttttggctatatgaaggtagtaacaatgagaatgatgaagcaagtagctcattgattaactctaaatttatcatatctgataaattaataaacattgggcctttgtcctgatattactttaggttattcatcacttgatattaaacttcatggtttacctaacccaaatttcaaagaaaaggttatttatggctcatctggacttgaggaaactgcatgcatatctgaaattataccatccgttaaaccttcaataaaatcatcattaaaattttcaaatgctacaaaaatttggacaatagcagaccataaaaacgaaactaaatacctcatcactactgatcacaagaaatcaaaaacagagatatttgatgttcaaaatgattataaaactataaaaagtaaaaattttatcaataaatctttcacaattcaattcggtgttataacggaaggtgaaaaggttaggcccgtacaagttgtatcatataaaatcatggtatttaatatggcttttaatcatttaactgcaatgagttttgacaaagaaattaatcattgtattatacaggaaaatcatatagttttgttaatgaaaaatggtgagattgaaatccttgaatatgattgtaaaacagagactttgaacaaaatggatttaccggcacttttaaattatcaaatttttaccaatgcatgggtatctaaatcatctttattaaaccatgcaactcctataaagaaaaggactttagatggtgatgttactaaagttgtgcagaatagtgaagaacaaatattattttggttagttactgccgataatcgtctattagtattcaagaaaaaccatttagaaaaagttttcgaatttaaaaatatacacaaaatgtctgaatacttacaattatctagtatggatccaaattatgaagctgatgttgatcctattttgaaacaatgtatttacactaaaattggtgatgagtatgatgcaaagaattatttaatattgcttacatttggtggtgagataataatttacgaatcattttttgatccaactcaacaatgttttaaattaattaaatcaaatgatcttttccaactaccaatatcgggggcacctggaaactcatattcttatgctactaaaattgaacgtaacttgttcaaaataaataatttagatggtaaacaagttgtgatggtcactggtgctatgccgtttattatatacaaacaatataattcagttcctagaatgttcaagtttacttccaaaccacttttgtattttgcaccatttacaaatagtgcatgtaccaatggtttgattactattgatgataaaatatcatgtagaatggttcagttagacttaacttatgattattcaaacaagctacctatatcaaaacattgtattggtgaaacaatcaacaaaatctcatatcatgaagctactaatacttttgttatatctacattaaaaaaagaaaaatatcagttattggatgctgaaggtgaagatactattgaatacaacaaagaactaaaaaatccagctcttaactacagaggtagtataaagctaatatcacctgaacattggaagcctatagatacaatggaacttgaagtcaatgaagtttgtacaacattgaatgttatgaatttgaaaaataatggaactgatagtgaaagagtgataatattcgttggtacaggtgtatatcaaaatgaagatgttccgacttttggaacgtggaaattattggatcttattagtgttgttcctgaaccaggtcatccagaagcaaaatacaagatgaaatcattgactagtgaaacttcaaagggtccaattttagatgcttgtagtgttgacggtagattctctcttgtacaaggacaaagactgatggtgagaatgattaaaaatgaaggtaatgctattccagttgcattcacggatacttctttatattcagtcaatgtgaaatcatttgaaaacttgatggtgattggagactcctatcatggtgtttcattgtatggatttgatgctgaaccatatagaatgatatctttgggtaaagatgaacatgaaatgaagttgagagaatgtgactttattgtacacaatcaaaacctatacattttagcagctgatgataatggtattcttcatatgctgcaatatgatccatatgatacatcattctttaaaaggtcacaaattgatcagaaaatctgcatttagatcaaactcacatacaacaagaatgcttaatgtcagtagaagggcttcatttttttcaatggtttcgactttacctattagaagtgatgttgatttaggatttgaagttattggaagtaatattgacggttcgttattcaaagtatctccgatcaacgaatatcaatatcgtagactttattcattacagaactacattgctgataaagaacaccattggttaggattgaatccaagaatgaatgcaactggtaatttagaagatgagttaagtgtgatcaagagaccttttattgaatataaacttctgtccaaattcacatcaatgaacgaagataaaaagaaattgtttgcaatgagacttggtaaagatgcattggtggatatttatagagatatgatttctcttcagtagataaactataattttgtaaaactatttagacatcagattaatataattttagataacgtatatatggtacacatgtaaagaaaaggttcaattcctctgaaagagaaaaatagatttcaatccttagatctgcaattttccttttcctttggatcgacaatgttggataccattaatcctcaagaatggaattatataggctcaggatccgcaaacgtggtgctggggtatattgggaacaatgatgacttaaagggaatggtagtgagactaagattaagtaaatcccacattagtaccaaagagatctatgactatttaaattcggcacagtttcaatgaactaaagagatacattcctaaaatgacaatccataaagttggaagtcatggcattttatcctttcagtcaattttagatgatattggaatgaagctttccatcaaacctacagatgaatacgtgttattaatgagaaatatatttcagttccctatacaagattatcaacgaattgaattaaacaaatactataagttttttttccataaaacaaacaaagagatagtgtttgaactgaaaccgaagtggctctataacctccctgaaggttataaaacgtgtcgtaattgtattatagctcaatcaaagggacaatcatttatcatttgtcatttaaagctgttgggaaatgaaaatactttatctcaatggtgtgaagaaattaataacgagttgaaaaaaagaggattacagttggacttgaaagaaaagttacaggaaagtttactggagaatcatgatctttttaaaagaattgcatcgattcaaaatagaattaacattcatgagagattggaatcactaaattctgagactgatgtcaatgatgagctttgttttgcgatgacaataagagatttgtctatacttattaaactaaacacaggtgaaacttacatagttgatctggataagaagtcctctaagaaatggagatcgtggaaagaacaagaattgaaaattaaggatcaatatttaaaagatttagattttaattgtagattcgaaacaaacacttgaatcttccttcaagatccatactctaaatttacctgatgacatctttttaacattaatttttattgtatcattaacaaaagttgggcttgttattttgtatttaaatgatgtgattggggtcgttgggttatgatttcgccaaaactgcaatgctagagaaataagtagtggtgcctctatgactacttttggatagttctcgatattttttgcatattctgggttgtaatgtatttgatgggagttgaaagttattgcactcattctaaaactggatacaattgatggtttgcaagatgtactttcatcggggactgtttcatcaattattggttcttctagtaatttcttgaaaacattatttaggtaacatagtaaacgatgctctatgatagagtttcctttgtcgttatcaaaagatcttttataatcagcaagtatcatttcatttctagtgagtattttaactttgtcaacagtttctgtaaaatttataggttctccaaactttaaaggattactgttattaaacagaaatgacccgcttacccacattcttctctgaaagtactcgttacaatcgagcacaggtgcatgataattgtcataaccatcagtacttagttcgtattcatttgataatggattacaatatgctaaagaatagcctattggcactttatctcccaatttaaagatatcattaatgttttttccagttgaattcactagaagtgactccatgaatggtggacaatctttgtccaacaacgattgagttgtaatgtaaagctgttttgcgggaaatgttgatacgatatcgtctttaattacccattttgaattaaagaggcgctgttttatcttctcaatttgtggctttgaagggtggttgtttgatttgataaatgtagagaaaacccttttacgtatcattactgaagaagaaagttgggttttttgaagtttgatccaaaaaaattcatgtttacactgatttttttttgaccctccgagatttgattaattaggggaacttcacgagtttacagtttaacggttgtaaggtaaggttgttaattttggagttggaatctatataagtatctatgatagttttaacaataaaaggggcattaaaaggtttctatttaacaatagagtatagtcataaaattaagcaattaaatttttaatttctgaatcagttaaaatcttgtcgttaatatgaacagagttagttaaaaagacagtcttaggaccttttaattcaataaatgtacctgttttatcttgaggtaatatattttctttaatgaaagttaagatttgattgaaagtagttgaaagagttgaaattgcatctagtactggtttaacatttggattttcaagtaatctttgaggaatctgtatgtattttttaatccaattgaatctcatcaagaatggagggatacttatacctaaattgacgacactttcaatttcactttctaaagatggaacggattcgcttttagagttagatgtataggcaacaattgttttagtgttaacttgaattgattcgttttcagtaagatcaacttgtataatttgacctggtgtagaaattatgaaagtgccatctcccttcatcaaaaggctttgacctgctttagaaattgtagaaggtttaattgaaggtcctgaccatgcaaataatgaacttcttctaacaacccaattggcctttgtattatctaaaattgcaaaatttgagttttgtgcattattcgccattaaaaatgacattggttccttttcattaaaacatctttgaaaaattaaattaggttcctttaatctagcaagttcagtgtacattgaagtaatatgaccattcatagctactattttttgttgtgaatttgaatagcgtatatttaagatagaagatttcggaagttttatattaagtaagttagatgatgatcctaaaacttgatatgtaattggttcaacaaatgcaccgtttcctgtagccattggcaatgaagtgagtggtttctctaattttgttccagggtgttgaagctgtcaatgtgaacaaggatttaatagagctaaaggatatatttcttgtctgtattatgttcatccttgggtataatgtacaattgtttcacctggtagtccttcaattgttgaataattaagataaaaaggcaacaatttcaattgtacttattgcagcatcaactacttttatctcagcgaaaaatctttcctactgatttgctttttctgttgaagagagattccttttatttatcacatcaaatatctctactgggattgaaattaaaaactgaattcatcaatgagaaatacatggtaacaatttaaagatataattgaaactattgaatacctttggccttttgtctagtcatcgatataactactatattacaaatggcttaaaaaaattacttaaagtaaagcacataaaaacaaaaaatcaatgcgagctatgtggatcgaacacatggcctccagatcttcagtctggcgctctcccactgagctaagcccgctttgttgtaataataagaccctatgcttgctcagtagtcgctttacttatcacgtgattttcaatttatttgaaaataatgttttaaaatcacaattttataaatgcaatgtgtaatattacttaaaatattgttatgctaaaagaatgaattgagaataaactctcttgatagtaaaaattgcccaaaaatttttacttcttttttggtatgacataaattaattgttttgaaccaaaaaaataaattttttttgccataatatttttttatgaaaataagacccagcttagtttattatgagctctggatagtaaattaagtttttaaattgtttgattacgtaagcaataaaagcaactcttaaaaaacttacctgcttttcaaactcataagccgttctagtatagtggtgaagtacgcatcgttgtggccgatgagacccaggttcgattcctgggagcggcacaggtttatttttttaatttttaaaatataattgaagttgtattatttttccataactatttttttatgtttatgcttgtcgattaaaaacaggtaaataacaatataaaaaagaagatatacacgtgaagtttaaatatttaaagatttatttatacaaaacttaatttaagagtttagtaactttaccaattgcgatagtttgtccttgatctcttaatgtaaatctacctaattgttgataatcttcataagtttcaagacaaacaggttcactagtttctaaaattgcaatgattttcataccttgtttagcaaaagctggagctttcttagattttctattagtacccttttctaatttatgtaataattgaacgaaattaacttcttcaatagcagtatgaacatgcataacacatgaaaaacctgatgataaaatagatttaagttcaacaattgcaacttgagcttcaaatctagtaacggtatgaactggatgagagattgatgataaaacgtaaccagttgaaacatcttcttcttcaacattctttaatcttaatctgacttgttcaccacaaaaagcagattcagccttcagcttcagtttcattatatatagttaaaacttcaacagaaactttatttggcatcattattaaacttgaaccttttttaatatgacctgattcaattttaccttcaataacggtacctaaatctttcattttaccagaaattggtaacatgaatggatcattaatttttctttgtgataatggcatattatctaaatattctaataatgaaggaccagtataccatggacaatctttctttggaactctatcctttaaacctgcacctgtgaaacctgagactggcataaagacgacatcttcctttgcataaccaacaccccttaagaaaagagataacttacttatacattcattatatctttcttctgaccaaccaacagttggatcatccatcttattaatgacaacaactaatttattaacaccttgagttttagctaaaattgcatgttctcttgattgaccacctctttcgaatccctgcttcatactcaccctttcttgctgagataactaagacaccaatatcagcttgagatgcaccaccgatcatttcagagacatataatttatgacctggagcatctaaaatagtataacgtcttttgtcagtttcaaaatatgatttaccaacttcaatagttttaccatcatttctttcttctttattagtatccataatccaagataaataccaaccttgtctacctgcatcttttgcttctctttcatatttttcaacagtacgtttatcaactgcaccagttaagaataaaatattaccacccatagttgatttacctgcatcaacatgtcccataaaaataattgaaacatgatctttaccaccaaacatatcactaacaactgatggatcaattatatcttcttgttctgcaataaccgattgtgatttggaaattggagctgatgaaactggtgtagattctttagttgatggtttagattctgactttttagcttcaacttttggagtttcttccttaacagcttccttaacttcttcttttggtgcttcatcctttggagtttcttccttagtttcttccttagtttcttctttagtttcttcctttggttcttccttcttcttaacagccaatttaacagtactggattttaagtttaattttaaaaccttcttttttggagcagcattaaccttttcttgttgttgcttttgaaattcatcaaagtttaagttctgagcaactggttcttcttgtgcttgattattgtagttattgttataattgctgttataattgttgttataattgttgttataattgttgttataattgttgttataattgttgttataattgttattgttatagttgttattattatagttgttgttataattatttctgttgttgtaattgttattataaccacctcttctgttattgttattattataattgttgttataattgttattataattgttattatagttattattataattgttattgtattgttgttgttgttgttgatttggatcaaattgaggaacaaattgttggaaattcatatttggaacaaaagtgttagcagcatttggatcaaatgcaggtgcgtttaaattaacattttgaacaccttgagctaattgattaggatcaaatttattagcttgactatctggttgttgattaggatcagacattacttgtaaaaggtatagtatcaagatatatcaaggcaaaacttaaagttcaagatatgttcacaatagcatttaaaatttatttgttacactagattttgaatttccatgttgaaaaagtgaaatttgaaaaattttttttactactatttttcatagacgcatcgaccgcaaagctttaaaatccaccgacccatcgaccacctaagttttacctctgtttcaaattgatttccaagaaggggaaaaccaaaacacatgaaattaatttgtttaattaatggaatccttgaataataatattttatgattgattccagatagatcagatttatttgtacttcacatactcttcttctgaaattgtgtgctttagtttaaaccccttttttcttcaaactgtaacaactaaattatggatccggaaacttatttaagccagaattttgacccttcaaagctaacagtgcctaatcttagatctatattggtagagcatgaagtttatttcgcatcaaatgcaaataaacaacaattagttcaaatattcaatgataccatcaaaccaagagctaaaactttattgaaaaaatatacaaagggttccgttaatccaatatcagataatttatttgatgaaaaagtgatacctgctaaacgtcaacttgaaccatctgtacatgtacaatccagttcatcatcatcctcatctacttctaatacagtcaaacctaaaaaggctataaagaaaataagaaagaataaaaatacttcattatccgatgattcaagtaattctttcctttcaatcgaaaaattcgaaattaatgaaaatgataatatattccttggttcaatagatgataaatctatacatattttaccacaaactaaatttgccgactcaaatagacaaagatctaaaacgccaactaaaaaaattcttgaaaattttgataattcaatcccatcaagtaaaaaattcaatgtggaaaatggtggcaatattattgatagtaaaaatgatagggaaattgaaatttcatttgataataataaagaaaatattaataatacagtcaatgaaaataaatttaaaaccaacctatttgataataaaaatgatgatattgtcttaatagatgatatatacgaacaaaaaaatattacttcaactccgacagtagataagcttcaaggtccaacaaatattattaataatgaagctattaatgtcgtatccgaaaataacgatggaaacaataaagaagttgatattgatgaatttgaatttggtgacgataaacttgatgatacagtagttaaaacttttgatgttaaatcattaacttcattagaggaagattatgaagatataagttttagcgataaatcaagagatgatgaaattgtttacgaaaaaattcttgataaaaatgatgataaagatgttaagcctgtaattgatattgttgaagcaattgaaactgagatacctaatgaaattatcattgaatcagaaaatcttaatgaaacttcaattaaaatacctaatacaaaacctaaaagatcattctttaaaagatttcttctcacaacttttggtattttacttttaacaggttcaggttctatatactcattaagaaaactcgattctgaaacaggattctgtggtataaaatccgaaaaaccagctgttaaatttgatctctggtcaaaactaccagaatcaatcactaccaacttagacacaataaaaccatatattgataattctgaaaaatttgctattgataaacttgcaattggatgcaaaccatgtcctttgaatgctaaatgtgaatctgattcttataaatgcaattattcatatgttaaaaattatggaattgagtcattatatggattattaccattaagaggtaattgtgtctttgataccttaagagaacaaaaattatattatttatcacaatatactttaaaatatctacatgaaaataatgcaaaaaagatatcattagaggaacttcatgattatctgctaatgactaaggaaactcaaataagtgatgaagaatttgaaaattattggaaatcatttgttgaatatgaattgaaaatgaattctgattttgaatttaatgtaaatacaaatgagattactattagtcatataataccaaccgagtattcaactagaagttttgtcaatgaacaaaataaaagacataaaaccaataagttattttcacaacatccaccaactgatgatttgaaaaaacatttgacaataaatatctaatttgcttttccagtgtagtttgtttctatttcgtttcatttttatataataattttatagctttaataaattttagtgtattaaaaaataataaatagaattacaatagaggaggtggggaaatttttttgaaggttatatagtaatctaagagataatatcggacactgcagtgtttacaggttcagtaatttgttcagaaataggttcagaaacaatttcagaagcaggctcggatattggttcagagatgggtgcagaaataggctcagcagtagcttcaaaaactggttcggatgtaatattttctgaagtgatattttctgaagtgatattttctgaagtgatattttctgaagtgatattttctgaagtgatattttctgaagtgatattttgaatggattcatttcctaaatcaataacttcaacaggtgcttcaataatttgtaaatcatcatttccattattaattctatttttcaaacgttcttctcttgattgtaaaatattaccattaccattatttcttgattctcttaatttttgtctcttctcagctctttgttgtgcggcttgttgtttaataatttcaaattctttcaatctttcctcttcttctaattttctctttctttctttttcttctaatcttgatgaacgttttctattagccattaacatttgcatttcaatatctctcttacgttgagcattctgttttctcttctttaaatcatgttgaataacaaaatcaacattagcttcaagaattttacttaaagtatattcatttgaagaagttttcttaccaaatgaggatttaagagttttaataagattatcatattgataaagaccagctgttaaacactcccaatgtatcatttcaggattcaattgatttaaatcattataaggatctttgaatttagaatcaaaatcagttttctttgaaggtatttcaattttcttaaattcccattttctaaggtaaactcttgcatcttgtaagataagatattcatactttaaatttttttcattatattggaatactggtgtaattcttaaatcaatatggggttgttcaaatttatcaacagtttttctgaaattagcatgactcttagtatttgatagcttaattaatgtgtatataacttcaattttttgctctaaggttaatgtagagtatgttagtataggagtgtcatcatcgtcatcattgtcatcgtcatcaccattaaaattagcattaacattatccttcttaacgtcttcgactccttcaggaagaagcaattcgtaatctttatagatttgatcaacaaagaaatcaaattctgaatcaattgtaactaatttttgatttttcaaatgttggattagtttgattttcaaattatttatgaaagaaggaggagcaatacctaacaattcttcttccaaattttcaacatcgaaggcatcacttagtttaatgatatgcttaagtaaataaatccattgaactatataggaatatttatagttatttctaagagcagttagtctagcagcatatactggattctcaatcagaagtagcttaggagtcttcaaatactgagccttgacctcttcaggtacaatcttagagagagatacagcgggatgttcagacattgtctatattgtgcaaaggaaccttctagaaattatcgatggatataaaaatggagaatattaacatttaaacaccttaaaaaaacatgtaaataaacacgacaaaatcagtgtcataaacatgcgttacgtaatacgatctgaaactcgttaaatccgtaaaaaagcctaaaattaaattattaatcatcatgagaacttatagcttatttcctttttttccctttccttcttttcaaattgtatacatacatctctttcttttcctgtttttatatccctattactctaattatccatcaaatgcccgttataaagagatccctaactgatataacagatgatggtcatcatgaaatgaatctaccagtttcaaataaccctcataatgatttattccaatttatttccatcccaaatgtttcacaagaatcacttcaaaagactgaatctgttgatatggatatgaacccatctcattcttttaattctaataatttaaataatttatcaagtatgattaataataataataacaataacaacaattcatctaataacataacaaatcatgcatctatttataactcttatgcaaatcctaattcttttgcaaatcctcacttaaccaattatttatatgatgataatagttataataatatttataccaataataatgatgataatatggataatgggtttaataatcaatgtttaaacacatcagaatttactatgaatcaacaaaataatcaaatattcccatcagatttccaattttctaataatagcaacactactactaataataataacaacattaatgaaggtatacctgatgatgatattttaatggttcctcaagataatttctatatttatgatcatcaagatcctcaatttgtacctgaaatgatgcaattggaattatcaaataaatcattccctcaatcaaatgaactaaatattttcaaaggtaatgatgttttatatgaattttccgatgatgatgatgaagatgatgatttagatttacaaaataaacttgatgatgatgatgaagaagaagatgaagatgatgacgacgatgatttcgaagatgatgatttatataacctcaatcaagataatagtccatctggtgcatctattttctctgctaataacaataatataactcctaccaatgataactatgtcaataatagcaacatcaataataacaatttcaacacgattaatatgagacctgatacaatgatgtcaaataatgattcatttaacgaaaactccatttattcattaactgttccaaaccaactaaattcaaattcaacagacgtgtatcataattttccttctcctttatcaaattataataacatgaatgagaccagtttatattccagtgatgagaatgatatcccttctataagtatgaatgcattcagtaatgctattattgctcaaggtgacgaagacgacgatgaagaggacgatgatgatgatgatggcgaggacgatgatgaagatgatgaaaacgatgataatgattttgcaattgataacgattctgactcagaattaaataccccaagctcaaatgatcgtagatcttcagttacctgcagatacaacaccaataatcaaaaaggaaagatcttcatctttacgtccaactacaagacctaaaagattaagaagaaaatctcatatatctaatacccttcataacactacaccattaagaaaaccaagaaattcaacatctaattcagttaataatgatttttcaatcaatgatttagatgatcaagcagaggaacatgtttgtaatataccaaatcctaaaactggtaaaccatgtctgaaaaaattttcaagaccttatgatttagttagacatcaaaatacaattcatgcatcaaaaagatcattttatagatgtatgttctgtgaagatgatttaagacgaaaacatggtttagagagtgttaatgaaattgtcgtttcatgtaaatatagaaattctaatttttcaactgaaaattcacattctcatagttcaagctctcataatatcaaaaaagttaaatctggtgctctcgataattctggttacttaagtaataaaactttcagtcgttgcgatgcattaacaagacatctcagattcaggcatggtttaaacaatactcaagtcaatgatgcaatgaattttgccaaaaaaaatatagagttttatgataattaattaagtaatttacttgataattattttaattcgcaaatcttcaatactacaaaaaaataagtatcctccaatatcatatccatactattttacttttctaaatttttaattctatcctaatctcctcttttgaaacctttactttttttataatacaatttttttcataaatttttataataaactaactatcgatcttaaaaaaattttaacctttatttcttttaaataaaatacataacgaatatataatgttttgactataaaacagtttacctaatatggataattatttggctcactttcaacagtgtaaccttgagcttcttgaatttttgtttgctcctctaaatatggtagcaaaacatctttgaatttttcataccctctgtaagttttaacatcgtcatcccaacttaaaataccatctaataatcttttaggaatatatggttcttgacacattttggtcatcggtaagaaataagttctaatagtgaaaataatacaaccagttagtggtagtcttctaacactttgtctttctgaacgataataaacgttattaatatcgactgcagcgtcagcagtattccaaccaacttctttaatatcttctggaccaatcgatgaagaccaagcaacatcattatcagtttgaataaaataattgtttctaacaactggtttatcacaagttaatcttgaaaaaaatttctccattggtctcttcaatttttcatcatatttaggaacatcaccagtagtatgaattgcacttaaaggtaaattaattttatctcttaatctccaaaatcctgcaagcataattgcaccacctttaaggatatattgcccattttcgtcttctttcataattgcaatatcatcttgtaacattaatgctgccatttccattggatcttttttgaattcagattttggtatatcaataaattcaaaaacttcaccagtaactatattgttaatacccttttcagttttaacaaataattttggatatctagttggtaaaaaatttcttaattcaattaaagcttcaattgctgcatcccaaacttcatcttgtgtaccaattaattcatgtccacgttccttaattctttctaatttacgattatgatacttcatccacttcattatctaactcaatccatgaagtccagtccatcgatcttatacccatggtaacaaaataagcatgcttgaaagctctatatggtaatggaacagtgtccttgattgaccaatttgcatattcttcaactggcggatactcaaacagttcttccttccatgtacccagttttctatttttattatcagcttccttaatactgacatggtttaaactctcttgtaaatgatctattgtatattatcttacctttatatttttcaccctttgttaccaattaaatgtaagcaatatgcaactatagaaataaatataattccaattaagatttgtggtgatgtgatggaaaaagttccatcacctactattgttggcatcatcattgtttagttaaataacaaatcaaaatagaaagatgatatttgttggattcagatatattggattatgattttattataaatagtattttaccttagagatggttatggtggatagcagaaaaatttcttatcagctgtacaaatttgcctaatccggtaattttaaccagcgataataaccaaaaatttactaatgaaggaattgaacccatccaccagtcaataatattagcttacaaaatacaaaatcatgtcattataataactgattcaatccttagaaaattgcgctcacactgctttaaatgtacagtagtctggttaatttaccgttttggggtattatatgaataaaaatatttcaagttggatgtttctctcgtaccatctttaaacatgcaattatactggaatgctaaccacttgtatatcttttctaggataagtttaccgccaaagtaactctctagatactttgagcatcccactgtagctatgcaataatcgaaacaccttaatgtacgttttgtcttaaattggcgaagctaaactatagttttcaggaaatattgtgagtcaacgtgagtttatgtactacgtggaaaaatcattctaatgttgctagtagaactttagtagaatgtttttttggttatttaaaaggtgtagaaattctagtaaaaaatattttatgcttacctataaatgagctacaaactctttgaaaactgaacagatgaaatatttcaagttgctgcacggtaatgagtgactattatagatggtttttcgcgtttttaaaaattaaatgttagtttttttttgtattggcttctattttttcgataatttagaaactaaggctactttaaaaaatcaaaaaacaaaaatgttaatcttttttaaaaattttaagtacttttaattgctaatttagcttaaaatattaacttaggcaacttgaaaagtttttaatttaatttctctactaatatatgttaaagtaaaaaagctaagtgacaataaaattaatcacgtgaaaagataacaaggaggctaaaatgagcttttgacacaacacataagactggatggccaagttggttaaggcgtgcgactgttaatcgcaagatcgtgagttcaatcctcactctggtcgattattttttaatcaatttttttgttatagcttgattgcttgatttctaaagtcttttttataactacaatctaaatagtatagctgcaatagaatcaaagatttttaattatcgttctgacagtcatgagaaggtcaatagtttttatcttgttaaaaaaaaggaacatttcaaattgtatgatttgaaaaattattcaggaggctcagcaaaaaatgtatttttctctttcttagtttaattgattccattctttagctagcatcttttaacaggatataattaaacaagataaatattagaaaaaaggaatttccaattataaatatcaaaattactgtaaatggtcaaacaatagatttattattttcaacgaatcgtcgactttatgtagatcagaaaagaatgaaatattggatacagcaaattttaatattagcataaatgatggcaatgggtaataaacgagattttttttataaaaagtttgcatttaaagatgaaaggttgttcaacacataactgttgataattttattacaaaactttcaagttgaaattataaaaaagttcattaaagaattagcccacattctgccaaaacacattttaaagaaaagagatgaaataagaagatatttaatttccgaatacgaacaagaaataccgattcacttgagaatgatcattgaattttattgctgaatgaaatatatatattttttaatccattttctatagtaaaacaagaagaaattttagaatataatgtaaatgtcgtgaatgtggtatatcatacataattaaaaacgttaaacagataaagttgtaacagtgccatcagcgttaccaatgtaagccttttgagccatattaacaaataacccagtttcaacaacccctaccattgcttttatttttgaatttaaatctttaacatcagcaactgggatttcaccaaaatcacaatcaatgataaaattaccattatcagtgatgacaggacctgcctttgcaggagtaccaggtctaacagttggattaccaccaattttagataattcatttaaaattttattataagcatttggtacaacttcaattggaacaccttttttccaacctttacccaatacacccgtacttttacgatcatcagcaacaattataaaattatcagcggaatcagcaactaatttttcttgtaataaacaagcaccaccacctttaatacaatttaaatcagaatcaatttcatcagcaccatcgaatgcaatatcaattttggaaaattcttccaaattacctaaattaagtttattatctataattaattgttttgattggaaaccagttggaatgcaagtaaattgatctttatttggtaagtgtccaatacgttcagcaatataaacaacggtcgaacctgaaccaataccaattattttatgatttggttttaagttttcatcaacagcagcatatgcacaaaatttttttgatttttcaactaaagatgtcattttacggttgatattcagagaaaatatgtgcgatttaaagcatgtcattaatagaaataactatcaatcaatatatgagtcaatccatatatcaaagattcaaatgaaaaatattcacaaattaaactttttttttaaaaacatggggtgtctctccgataaaaccattgccaaaaacacgcacgtgacgcacacaagggcttaattacagaaaatcaaattctcagaagatttctgcacgaacccttattaccgcaatgggaaaaccaattgaaagacccgcgcaccacataatgagtgggaaaaactataatttttcaatttcctaatagtggaaaatggaaaaaattgtaaattttctacagtggggacctactgcggatagtgatattactgttttggaaatattttcagtattattcaatattattacatctaatttcataaattttacgttaatattttcagaaatacttacattagattttattacttttaacgtctaataacaccaaccatgtctgctgcatccaaggtcttaaatgctcaaccaactgaattagaattacaagttgcacaagctttcattgatttagaagcttcatctgacttaaaggctgaattaagagctcttcaattcaagtctgttaaggagatcgaagttgcgggtaacaagaaggctttagtcattcttgtcccagttccattattatctgcttaccacaaggtccaaatcagattaaccagagaattagaaaagaaattcccagaccaacacgttgttttccttgcagaaagaagaattttaccaaaaccagcaagagtttcaagattaggtcaaaagagaccaagatcaagaactttaactgcagttcatgaaaagatcttagatgatttagttttcccaactgaaattgttggtaagagagttagatacttagttggtggtaacaaaattgcaaaggttttattagattcaaaggattctactaacattgattacaaattagaaactttccaatcaatctaccaaaagttaaccggtaaacaagttgttttcgaaatcccatcccaaactttataaatttgtttataagaacatacacccatcaaaataaattttaatttagttaataatagtaataattataataatataatatacattggatagcttatcatatattttatctaccatcacatggactgttttgtgactttaatattttactattgatgtagtttttcattataatagtagcattgtgatatttcaacatgtaaatttttttcatcttacgtaataaaaaaatgttgctatactatagactttgatttaaacacttttgataatccagtcaaaaactccaattgagtatccttatatagaaaaagcagatataatgttgaattactatagtaagccaataattcgacattctgctgaatactatacgaggttagaacttcaaagattcaatgataatttgagaagatattattcagaatcaaactctcctgactcattcggtagattcaatagatcagatgtttataaaaccacacacacacatcatgagaaaggtacatttgattttccgttcaaaccaattccagcttcttataaaccttccataattcattttttaaacaatattaagagaaaatattcattgatagaaaataatgaaactaccgatgattttatcaattatttaaaatgtgcaattaataataataatccagagaattcatcatgttatgatttctactttacattgcaaagcataacaccattattaagtgatagtttgatgaaaattgataataatgaaaaatttattgatttgttcagatttttatcctcagctggtataagatttgaatcagatgatgttatagaaaagtttttggaaatttataaaaaatctgatccacaattacaactagcattaataagatgtaacaataatatcagtccggaagaattaaggttttccgataaattaacaaatgatgaaatattaaatttaactcactcatattcttctaaattattgaaaaatataattactgaaatattaataccgttacactccaatgaaaaaatacttgaatatttgaatgttttatcattacacagtaagaaaacttgcaaagatcattcattattcaatcatatgatttatttaacacagctcaatcgaatatcagatttagaatttaaaggaaggttttcaatacttttcatacttaacgctataagcaattatattaaatccggagaatatatacctgtatcattgaagaattctttccatgaatatattttaagatgtcaattacaagaagttgatattgaaactatgcttagttatatagaatttttctatcctagtgatctaagaacattaataccaaaattgaatgattttgaattaaaactcatacctgataatttaagttcagaagtttcttcttacaaaattgaaagtatttcaaataaattacctttgagtattgcatcaatattatttgatcagttaattaaacaaaatgacatgccatcaattagagatttatttcgtgatttgaataatcttgattctagtattgaatacaataaaaaattattagaaacttttaagtcatctgctttcaaatatgcggtaaatgttgaacatgagcataaagaagttcaagaaactctattcgaaattattggactgaatgatgcatattttgtaccgaaatttgataaatttgatctctcaagtgttattaatacgcataactctgatgtaattgaaattaataaattttttaacacttatagaacaaaaattaaagattatcaaatgattacagaggaagatgtttcaaaattatttgaaatagttcaaccatcttcaatttatcatgagatgttaatgagatccttattatcgtgtaatttcacatttgaaaacacagaatttatcaaaaattggatggatgaggatccaagtagatgtgattttgttttaacaggtggtaatgatgacttaaaaactaaggatatattctttaaatatcatgtaactaaattttcaatacttaaaggattactattatttaaacccaatgaaattttccaaatgatccacaaacatggtgataacataacttacaaaaatgaattactgtctgtattatcaacattcagggattatggaatggattatcttattgcacaattagtatcacaggagttagaatctcacacaacaataggtttctttgaatttttaaaagatttttttaggcaaaataacttattaattgaactgattagtgatgatgataaattaaagatttatattgtctatattaaaaaagttatgggtattcactttacaaacggtgttattttagctgcttcattaataccagcatatcaaaagatatttttagcactcacaggtctgcatgattccttcatagttgattgtggtgagtttgcttctaaaagtgataagcttgatttacctatagatatcattaaaagttatgttgaatttttcagtgattttaggtcaatgaaaggcgggatttggtttggaatttatgcaagacttactaatgctattaaagaatttgaatgtgatgaaatacaaaagaatgaattgaatatttacttatttcaaaaatttcagaaaactgcaataaaaaattattataattggggcattactcccatttatgaaatttattcagtagcagaaaataataaggggttattaagatataaagtacgctttgatggaaatgctgaatttaacagatatattgcagaaagattttcaattgccaaaatttcaaataaaccagaaaaaaaaatatcaaaagaaattatgcaattatttgccactgttagtagatatgaaacaaattttattataagtaaggaaaacttattacatattttcaatttaattgaggataaagacaaagaatatttcatttatctattaaaaagattatcaaaacatattccatatgttgaaaatgtttcaagtattattaacaacacatataaattagatagggaaaaaaatcgtcgtttattaactatgtatgcggaagaacttgataatgaatactcacaaagtagacaaagaagaatatttgatgcaagatattttattccattttatcaatacgcaatgaaaaatacttttaagaaacattatagagaatcattaagaaatatgattgtggaatcaaatgcagttattgaagattttgaagaaattgaagattgtagaaagttttctgatatttatgatgcctgtgcgttcagaaaactgtgtgaagaggacgaagttcaaaatgatttggttatgtttcaaaggtttaatgatgaagttttaatgaaagatagaaatggaaagttaataataccgttaccgatctatgatgattttgtatattattatcttttcaataaaaccaatgaacttagattcaaatcatatgctagattcttgtattatttgacaaaaaaggatgaaaaattagcaaaattaggattttgggatattttaaagactaataagaataatgatcatatcgaggatgaatttgctggagaaattaatgatataatcgattttaatgaattgcctaaattatatgaagagatgagtaatgaaaaaattgcaagattatttggactatattattttagtattaattatacagaaaaaatcaccaccaatgagttaacaactttgattacaatgactgaaaacatattaagtttagaaaatttggataaagatatacaatctagattattatatcattcttttaacattatcgctaaacattcagatttgttatcagcattttacaaaaaggttaaaaacttcatacatttttatactccaccagtcaatctagctgatgaattattattttcaattgttaagaatgatattaaagatattgattcaattatctatttaatttgtgcaaagtttgattctccaaaggttgaaaagatttttggaaaagctattttgaaattaatgaatgatggattaaatggtttagcagaggaattgtatttaaaatgtattgaacgtaaaccaaaatttagaattcaagaacttaatgattcgttaaattggggtggtaaggcaaagagtccaactgttagaattgattcaaataatgcagttaatatgaaaatggataaatttcaagtgaaattatatgattatgcaaatcttgataaagataaaaaataagaaatgaaacttacaaagagttgtatataaataaatagaaataaataaataaacgttaaatgtagcattaggtattgaatcctttaagcatttcttctcttcttttacgacttaattcttcaaaactattatttggatgtttcatctgtccttgtctagtaggtgaatgattcctcttatattcttgaggtagatttaaatttagttttccagtatttgatcttttacgttcttcataacgatgtactggatggtaatttttggaaacaggtggtttatttttattaataagtgtttcaagtttatttgttaaactattttttctcgtaagtgatattggagtactattttttctagttaatggaggtgttacatctgattcatattcattatttgatttggaatcccaaatattatttgtttccgtgctactaattgaagaatttaatgatttagctgaagtattgaattttttcacttttggttcaggtattacttcagttgatatagttgtagatgtggtagagtaattgaaataacaatagcaaaaaaatccaaaaaaaattattaatgggaaaacacttgaattattagttgctggttgagatcgcaaaacattaatggtttccggatcagatgatttgaatattgtaaataaaagtttccctccaataagggtaaaaactaaactgggtatatgtattttcaatgatttatcatttgatatcattaaatcaaaatgaaggtccattttccaaaaattgtgaaggtttgaataaataactgaaagtatattcttaattatctttataatatcatttatatcaattgttgaatctgaatttatatcgttattgatattactatttgggaatatttttttaccatttcttaaaatgaaaggttcatctaatggatgaatattttgtgttgatttatctgtatcttttttatcattattatcgaaaacaacttcaaatgcattatttttcaattctttagaatctgaattattagaagatgataaattaggtgataattttggtattggtattattttatcattaatattatgagatcttatattttgttttgtgttatgagggttttgtaaattatttgaagaagttaattttgtatcaaatgattcattagttggtgatggggatggagttctagttaatttttcaaaacttatatttttagttaatttatcaaatattttattcttttgagtcttcatgtctattgtatagagaagtgtttaaaaataagagatatattgattagatattttgtattgtttaattgttttatatatagaatatgaaaaacacgtagatattgaatcaagattgatggagtaaatacgataggtcacaataacggtatatatcaataaatcaatgtgatcagcggtaattagaacaatcattaattgttatcagatacttagtaacaatcgtcagatcaaaccagccacccctaataattgcctaatcgggtaaccggcggaacgatgaaaaataaatattctatgggggaagctttcttttaagaaggctgttcaatgagttaactaaattaaattgaataaagtattatattatcaggttaaatacaagtaatataaaaacagggaataagttttatataatcctagtaataataatagattagaaataaataaataaataaagttaataaattaaataaataaattaatcaattaatcaacatacttatttgaatttcttaccgaataagataacttgtaattgatcgtacatggaaataacaccggcaccggcaacacctcttaagatgttagcaccacaacccttgaataaggatctaataccttcctttgcaacaatttgagagaaagcatcgaaagcacccttatatttgacagcttgaccagaagtcatcatcattcttcttctaacggtatctaatgggtaagaagcggtagaagcaccagtagtaacagcccaacctaataagaaagcagctaagaagttagtttctaatgaaccaactaaaacgactggctttaaggaatcgaataaaccaaagtataaacctctgtaaacaacaataccaacaacagatggtaagaaacctctgtataaacctgcaataccatcagaagcaatagtcttcttgtaaacatcgaataaaccattgaattgtctttcaccattaccctttgcagcctttgcatcatttgctaatctagttcttgcataatctaatgaataaacaaagaataaagaagttgcaccggccataccaccagaagctaagttacctgcaaaccaagtccagtaaccttcatctttcttgaaaccaaacattttcttaaatttatctttgaaagcaaagttaagagcttgagttgggaaatatctaataacattagcagtattacctctccagaaagaaacaataccttcttccttagcagttcttgagaaacattcaccaataccttcgtatctctttgctaatctaccttgctttaacatttcatcttgattttgaattaataatttaactctttcaattggagcagcagcagttttggagacagcagcagagacaccacccataaggaaatcggtccagaagttagattggatttttgattcagacatagttagataattatataaggataatactaagttaagaaactacctggtaaaagaagagaaaatcaaaagagaaattaaaagaaaggaattaaaagctattaaaaagaggataaatggaatcaaatggacaacctaaacaacttgagcggaggaccgtttattaaatacacttttggtgaaagtttcagcgaatggaaatttttcctttttcctttttattattatcaaagagtatgagaattactatttgagatatttttaattgacccgtaaattaattttggcagttcatcagtaatttaattggttgattttatgaggggcaagtttttatctctgcacagacgtatcgacgcaagggttcttttattttattttttttttcttttccgtctcatcgtcctgcggcttattcactagccgctttgtaaatttacatttatcttagtatgatcttttgtggctggtgtgttaatagattatatcaacaatcactacaagtaggtattatatgatacacatgtaaaacatggatatatttattataattttaatattttattaaaagaagttataaagttattttaatatttatttaataaggtttcttaatatataagattaaaaattaattaatttaataacctaaagcagctaatttagttgaagcttcagattgagcaacagtttccttagcagaagctaatttctttgaagcagataatttctttgaataatattctgctgcctttgcctttctcttatcttctaaagtagaaacaattgattcatatttccaaccaactgatgcagataatttacctaatgaagtatattttctacctggttttaatcttaaaactcttaaagcttgtggaacaacaattctcttctttttatcatatggtggtggaacaccttcgaaaacctttaatctttctaatgcagctgcacctcttgcagttttatgtggaatcatacctctaactgctttatagaaaattcttgatggtgctctaaaatggaattgacctcttgcatggttaaagttagtagattttcttaaataatcatgatactttaatttatttctgaagaattcaccagaaacgttcatagattcacatctaacaacgacaattttttgaccttctaaaagttcctttgcaacaatagatgctaatctacctaataaatgtcccttaccgtcaacgacaacaactggttgaaattcactcatgtttggttgataattaaatatgtgaattagaaaataaattaaattattaaaaattaagaactagaaattaaaactaaaagggtataatataaaaatttcaatagtaatagattcaaaaaaattcttaatattactatgaaaatattttacctaactaactaactaactaactaacagtgtaccatcactataataaactcactaatatttgatgaaaatttcatagattttcaccgcactctctctcactgaaaatttctattgtaaattatttagtctctggtgtgagggtgggatcgtgggattgtgcgcccattctatcttttatctctctattagatgattttcgcagtcacacaaattttcttatttttttttccatctcttcgcttaagttaccattttgggaatgctatcaaaaactgaatttattattatactaacagtatccttatcatgattcttatcatctgttttatttacaacaatataattatcaaccatattacgtataaatatcccaatatgttgtaaattaaatgaacttttaccccttctaaacggtaatataattgttttattatttaattcacataatttacgtaatttaattataatatccattatttgaacccttgccttatctctattaatgaaaaacgcgttgttaaatatttcatctaaatcttcaattactattatatcattattattattattgttattattattattattgttattattatcaatatcaatatcaatatcaataaaatttattatatcatctagattaacgtattgatgtattctaatcaattgtaaaatatttacaatattaatattaaaatcattatttgtcttattttttttccaaatattaattgtacgattaatatcatgttgtaatacactaaagtatacaatattaaaattacgattatttttataattatcagtactatcagtattattactagttatatctctattcaatctattaactaaatacttccgtacataatcaattgttgaaataccattaatactttccacaattgacatacaattatccattgatatattttccttacctaataaataaatcgatgatagtgatagtaattgtaattgcaataataaacaaaaaaatatctccctaatagtataaataacgtacaactgacgcgtaataatacatttaatcataaaattataaaattataagaaaattcccctcccactttccatccctccccttcatttaattatcatcccaccctatcccatttatccaatctcatcccacattgattacctaagtataataaacggaacatcggagattcattatactccactacatctgacagtttaaagtgactctttaatagacagacggacatgcaacaattgacaatacagaatatatcttactgttgaagtatttaaacaacttatcatgccatttgaatttcaaaatttacgttgaattgaaatcaattgattttattattcttatcttcaacttcttcttcatctttcaaatatacaatgtttgttagcaaagtagctacgaaatcaaatattagatcaagtattagatctttctctaatagtataaaatctaaatataattacaattacaattacaatagttataatagaaaatcaatttctaataacttgagattattagcaatcacaacaatatcattatcaactgcaactgcaatttatatatcatcaattaaagctgaaaatgattcaaatattaaatcaaaaaattcaatttcattagacgaatttataaaacataattcaaaggatgattgttgggttttaattaataataaaatttatgatgtaactgattttataccaaatcatccaggtggtgtaatgccactgatatctcatggtggttatgatgcaacaatgatttatgaaaaattacatccaaagggtacaattgaaaaattcttatctgatgataaatttattggtgaattaaaattaaaagaaaatgagaaaattccattattagagagtgattataaaactgatgatgaagaatttgaaattcaaagattagataatattgaaaatttacctcatatttcaacaattcaaaattattatgattttgaaaaattagcaaaaggtatattaccaaaggatgcttgggcttattattcttgtggttcagatgatgaaatttcaatgagagaaaatcattatgcttatcaaagaatttattttaaaccaagaatttgtgttaatgttagagatattgatacttcaacaacaattttaggttcatcatcatcagttccattttatgtttctgcaactgctttagctaaattaggtcatcctgatggtgaatgttcaattgcaagaggtgcaggtaaagaaggtgttattcaaatgatttcaactttaagttcaatgtctttggaagaaatttcaaaagctagaatacctggtgcaactcaatggtttcaattatatattaatgaagatagaaaagttgcatataatatggttaaagaagctgaaaaattaggtatgaaagcaattttcgttacagttgatgctccatcattaggtaatagagaaaaggataaaagattaaaatttgttaatgaaactgatgttaatttaggtgatgatgtcgataaaagtgcaggtgcttcaaaagctttatcatcatttattgattgtggtgttgattggaatgatataaaggaagttaaatcttggactaaattacctgttttaattaaaggtgttcaaactgttgatgatgttattgaagcttatgatgcaggttgtcaaggtgttgttttatcaaatcatggtggtagacaattagatactgctccaccacctgttgaattattagctgaaactgtaccagttttaaaaaaattaaataaattaagaccagattttgaaattttaattgatggtggtgttaaaagaggtaccgatattttaaaagctgttgctttaggtggtaaagatattaaagttagtgttggtactgggtagaccattcctttatgcaaattcagtttatggagaagatggtgttagaaaattaattcaaattttaaaggatgaattagaaatggatatgagattattaggtgtaactaaaattgatcaattaagtcctaaacatgttgatacaagacgtttaattggtagagatgctgctaattacctttatgacaataattatgaacatattgcaactgttaaatttaagaatgaagatgattaaataaatgattttgcgttttcttacagacagtcctttatcatgaattttttattattattacactattgttattgttattattattcttattattattattcttaaaatatgttacataataaattaaatatacgacttttatacaaaaaaatttgaaaaaacctatttattaattgatgactcttcatttactaacatttgattaagtaaactctgcgttttaagccaataatatcttgaaaaatctgtttgtttaactaattcttcatcaaatagtttacgtaattcaacaagtttggaatgatatattgtttgtgtctctaatacctcctttaattcgttaactgaaagtttatcaatagtttcatcatctaattcattcattgatattatcttcgttatgttattattggtattttgctttatatcttcctttactttattatatttctcaattgattttttagtctttttcgttatttcatttaatattgatggattaaattcaatattttgaattttataatggttaattaatttccttatataaccaccactggtaattttatcattattattaaaagtattaataaattcatcatgattcatttcagattcatttaatattctattttcataacttaatgctatttttttaccacttgaattcagatcaactttaaaaccattctttatgtcaaaatctttgaatatttcatcctcttttttcttgtaattctcaaatgtctctaataatgaattaccttcaagattatgaactgattttgaatgttttaacaaggcatcacatctagtaaatgatttcaaacattcaggtatcagacaatagaatggcctttcacctgtatgtgttcttatatgtgataataatgcaaatctactatgttgtgggaaaccttttcttgaacatttcttccattgacatgcataatctggtgtacatactttatattgatgtttatcatcttttgaattcccatttccatttatatcattactttcaacttccacttcaccatctttttcattatcacctccttccattgaaggttcactttctttattatccttatcctttgaattaatcaatgataattgtcttaatgataaaacatgacagttatagacatgatcaaccaaatgatccatttctttgaattctatatcacaatcatcccatctacaaatatgtatatcttttgggtctataaattgtgtattatttgattgtggttgttgatttggttgtaatgatagatttttgagttgttcaactctttccatattttgaaactcttgttctaaatcttcatctgatattttagatgatgcaggaatgtaatttcccgcctgatagttttgataatccattgtttgtttaataaagaagtgtcatatataaatgttgtaacattacaaattatagcagttataccactacttacagaacatgctgcaattgaaaaacgcttatgtaattttgaaatttttccatcattttcaatttcatgttttcgacgagttcctcttaataaactgttaaatttaatttttcattagttagtattagtatactggatcttctctttgaactttcacaaaccatctgcaagtatgtctggcttacaactcaatatcttgaaggtattaggggaaaagggttctatccctgattcaagtgttgaattcccaaatgaagaatctcaacaaatccaagcagcacttaattcattactcgctagagcaatgattacttataaaactcaagaaactgaaatttatagtttaacagacgaaggtaaagatattgtagcaaatggatctcatgaatatagacttttaaataaagttattgaaagtttagaaggtttaaaagtttctgatgttgattctgttatgggtaaaaatggtaaagttgcacaaggtcgtgcatttaagaatggttggattagtaaagatggtgacaaacttgttactaaacttgaaaatgcatcatctgttgatgatactacatcagttcaattaaaggaaattgtttcaaatggttcattatcaaataagaaagatttagctgaattaaagaagagaaaattaattattccaacaaaacattttaaattttcaattgaaaaaggtccagaatttgcattagaaattaaacagtttgaaactgatattacaactgaaatgattcaatcaggttcatggaaatctgctaatttcaaaccttataattttaattctgaaggtgatttaccaaattctggtgctttacatccattaaataaagttagagaagaatttagacaaattttcttttcacttggtttttctgaaatgccatcaaatcaatatgttgaatcaggtttctggaattttgatacattatttgttccacaacaacatcctgcaagagatttacaagatactttttatttaaaagatccaaaagttgcattaccaccaagtgataaagaatttttagaaaatattaaaaatgttcatcaagatggtgcatttggttcaattggttatagatatccatggcatttagatgaatcattacgtacagttttaagaactcatacaactgcaatttcttcaagaatgttaaaagacttagcaaaagatccaaaaccaacaagattattctcaattgatagagttttcagaaatgaagcagttgatgcaactcatttagcagaatttcatcaagttgaaggtgtctttgcagattataatttaacattaggtgatttaattggtttcatgcaacaattttttgaaaaaatgggagtgactaatttaagatttaaaccaacttataatccttatactgaaccatcaatggaaattttttcatggcatgaaggtttaggtaaatgggttgaaattggtaattcaggtatgtttagaccagaaatgttagaaccaatgggtttaccaaaagatttaagagttttaggttggggtttatcattagagagaccaacaatgattaaatatggtgttagtaatattagagaattattaggtcataaagttaatttagattttattgaaaataatcctgctgcaagacttgatgatgatattttataattattataattattataaatcattatattttcctaatatttaatcctttatatataatttatataatatattttccatttttataaacaatattaatttttcattaattcaaatcaataaaattcaggtgttttgcacggctgtaacactaaaaaaattaaaaaactgataaattttttaaattttcaaaacaatttttagcgtttaaaggtgggcaaaaaacgacctcttggaacagtgccataaggtttaaaaacaactttttttttcaaatattataattttttgtaaaacattcacgtgatgcattacgtagtagcgactcgaactagaaaatttaaactctaataattgggcgtgtggcgtagttggtagcgcgttcgccttgcaagcgaaaggtcatcggttcgactccggtctcgtccaaacataataaacagttattaaatttatttaaaacaaaactttttttcatttaatttaaatttgcctaattacttcatagtgtccctttgtaggtagttattgttcaagcgtcacatcgacgcttacaaatttattaatattagttagagaggaagttgggttttaatttattttatttaattgtgagaaaagggtaaaaagggcttttacactgtgtgttagctctttcaacagtttgaatttgttattccgaactgataagagtttgacaggttggtgataaattattgaaaatattctttacagtttagcaagttcttatagttactttgtagatatatgtgttgttgataagacatgtgttagtttgaatattgttagttgtagtgttaactgttacttaactcttgtgaagaaaccctgttctgaaagagtcaaggttttacgtaagactcataataataagaaaaaaaaaaagaaacgaagtggaaatatagagaacaataaaagataatagtaaattaagtcattaaagttgcaatacattaaatttattaacatgtattactgactattactcttgtgatacaactgttactaacataatgcaataataataaaataatcaatatgcatcgattgatcaaagacaaggccttgtgacatcactatcctcaacaaagaaaaaaatatttttttttttaatttttcacttcgcaaaaaaaaaaattttttttcactttctctgttttatgtataaagttaccaggaaatctttaatttttgaattatcccttaaactggcaactattttttttcctttactttaggtattttaatcctattttaatattttatagccattcttttctcctcttccttctccagaacagacccagctgatctaatctcataccaaacaaaaagaaaacattttagttttattcttaatatcaattattaactaaaactttattatacttttgatttacaaattattaacccccatatatttataaatcatttactcaattcaattgttttcatactttgaaattattactatatctgatatatttttaaatttaaaaggtatgtattaaattttattatttgaaattttgaatttttttattttactcaattttttattcttttttacattgatattattactgcattatgattaatttgatacaattagatattactgttttggagaaggaaaaagaaatgaaatgagaaatttaaatactacaaattgttatactttttggaattggaatttgatctttaactttcctttacttctccattacaacaatttaatctaattgtaatctttattaattgttattgtgagtattaattaattgaatgtaaaaaactatattaaattttgtaaagtgttcaaaaattcttataagcccacaaacaaacctgaatttttatactaacatgaaaaaaaatggctttcctcgttggaaaaaaatttaaaaatatttttttcattacagcattattttaaattaatcacagccaaaacttattattatattattattattattattattattataaaatatttaaaattacacaatggtttttcacaatccaatttccccagcatttgaaaagctcggtaaaaaattagttacattagaaactcaagatggtgttgcaattcaaggttattcatttggtgcagatgttgaagcagccggtgaattagttttccaaactggtatggttggttaccctgaatcaattaccgatccttcttatgaaggtcaaattttagttatcacttatcctttagttggtaattatggtgtcccagatagaaatttaatggatgaagttgttaaatcaattccaaaatatttcgaatcaaataaaatccacgtttccggtttagttgttgctcattacactgaagaatattctcattacttagcaacttcatcattaggtgcttggttaaaggaacaaaatgtcccagctatttatggtgttgatactagatctttaactaaaaaattaagagaaaaaggttcaactttaggtagattctgtcttattaaagattcagttgatgttgatgcagctcttgcagattctgaatggcaaaaaaacttcaatattccaaactggattaatccaaatgttgaaaatttagttgctaaagtctcaactagggaaccagttatttatgatccctccaactgaattagctaaattaggtccagatggtaaagttattagaattgttgcagttgatgttggtatgaaatataatcaaatcagatgtttcgtcaacagaggtgtttcattaaaagttgttccatgggattatgatttcaataaagaagaatatgatggtttattcatctctaacggtccaggtgatccatctgttatgactgatgttgttgaaaaattaagaattgctttagattctgcaaaaactccaatttttggtatttgtttaggtcatcaattaatggcaagagcttcaggtgcttcaactttaaaacttaaatttggtaatagaggtcacaatattccatgtacttcaactatttctggtagatgttacattacttctcaaaatcatggttatgcagttgatgtcaacactttaacttctggttggaaagaattatttgttaattctaatgatggttctaatgaaggtatttacaatactgaaaaaccatatttctcagttcaattccaccctgaatcaaccccaggtccaagagatactgaattcttatttgatacttttatccaatccgttattgaatttaaacaatccaaggtcttaaaagcagttcaattcccaggtggcttaaaggaagataatgtcaaattacacccaagattaaaaccaaagaaagttcttgttttaggttctggtggtttatctattggtcaagccggtgaattcgattattccggttctcaagctattaaagcattaaaggaagaaggtatttacactattttagttaatccaaatattgcaactattcaaacttctaaaggtttagctgataaagtttatttcttacctgttactccagaattcgttagaaaagttattaaacatgaaagacctgatgcaatttactgtactttcggtggtcaaactgcattaaatgttggtattaaattaaaggatgaatttgaatctttaggtgttactgttttaggtactcaaattgaaaccgttattactactgaagatagagaattatttgcaagagcaatggaagaaattggtgaaaaatgtgctaaatctgaaactgcttcaaacattccagaagctttagaagctgttaaagaaattggtttcccagttattgtcagagctgcttatgcattaggtggtttaggttcaggtttcgctgataatgaagaagaattaattgaactttgtaacaaagcttttgctgcttcacctcaagttttaattgaaagatcaatgaaaggttggaaagaagttgaatatgaagttgttagagatgctttcgataattgtattactgtttgtaatatggaaaattttgatccattaggtatccacactggtgattctattgttgttgcaccatctcaaactttatctgatgaagattacaatatgttaagaactactgctgttaatgttattagacatttaggtgttgttggtgaatgtaatattcaatatgctttaaatccattctccaaagaatattgtattattgaagttaatgctagattatcaagatcctctgctttagcatctaaggcaactggttacccattagcttatactgcagctaaattaggtttaaatattccattaaatgaaatcaagaattctgttactaaggttacttgtgcatgtttcgaaccatcattagattactgtgttgttaagattccaagatgggatttaaagaaattcaccagagtttctaacttattatcatcatccatgaaatctgttggtgaagttatgagtattggtagaacatttgaagaagctattcaaaaggcaattagatcaactgattatcaaaacttaggtttcaactcaactgaagctttaatgagcattgatattgatgctgaattacaaactccttctgatcaaagattatttgcaattgctaatgctatgtcaactggttatgatgttgaaagaatttacaaattaactaatattgatagatggttcttaactaaattatatggtttaattaaatttggtgaacatattggttcatttggttcaattgaaaaattaccagttaaggtcttaaaggaagctaaacaattaggttttgaagatagacaaattgctaaattcttaaactctaatgaagttgcagttagaagaactagaaaagatgcaggtattatcccagttgttaaacaaattgatactgttgcagcagaattcccagctttcaccaattatttatacatcacttacaatggtcaagattctgatgttaaattcgatgataagggtgttatggtcttaggttctggtgtttatagaattggttcatctgttgaatttgattggtgtgcagttactgctattagaactttaagacaacaaggtttcaaaactatcatggtcaactacaatcctgaaactgtctcaactgattatgatgaagctgatagattatatttcgaaactattaaccttgaaagagtcttagatatttatgaaatcgaaaattctgccggtgttattgtttctatgggtggtcaaacttcaaacaatattgcattacaattacaaagacaaaacttaaaggtcttaggtacttctccagctatgattgattctgctgaaaacagatataaattctcaagaatgttggacaatattggtgttgatcaaccagcttggaaagaattaacttccattgaagaagctgaagcatttgctgaaaaagtttcttacccagttttagttagaccatcttatgttttatctggtgctgctatgaacacctgtttactctaaggatgatttagcttcttacttatctcaagctgttgaagtttctccagattaccctgttgttattaccaaatatattgaaaatgcaaaagaaattgaaatggatgctgttgcaaaggatggtaaattaatcatgcacgttgtcgcagaacatgttgaaaatgccggtgtccattctggtgatgctactttaattgttcctccacaagatttagctaaggaaactgttgatagaattgttgaagcaactgctaagattggtaaagctttagatgttactggtcctttcaacattcaatttattgcaaaaaacaatgaaatcaaggttattgaatgtaatgttagagcttcaagatctttcccattcaactctaaggttgttggtactaatatgattgaaatggcaaccaaagctattatggatcttccagttactccatacccaactcaaaaattacctgatgattactgtgctattaaagttcctcaattctctttctcaagattatctggtgctgatccagttttaggtgttgaaatggcttccactggtgaagttgcatgtttcggtcacaacaagtatgaagcatatctgaaatctttaatttcaactggtttccaattaccaaagaaaaacattttattatctgttggttcttataaggaaaaacaagaattattaccatctattagaaaattagctcaattaggttactcattatttgcaacttctggtactgctgattttattcaagaacatggtattccagttaaatatttagaattattaaatgaagaagaagaagaacaaaaagctgaatattctttaactcaacatttagcaaacaacttaattgatttatacattaacttaccatctgcaaacagattcagaagaccatcatcatatgtttctaagggttaccaaaccagaagaatggctgttgattatcaagttccattagttaccaatgttaaatgtgctaaacttttaattgaagctattgcaagaaatgaaattttagatgttgatactattgatgctcaaacttcccacaccactgttcaattacctggtttagtttctattggtacctttgttccaactttagatgaatctggtgctgctgcatttgaacaaaccactaaagcttcacttgcttcaggttttgttttcaactcaatcattccatacactgctgaaggtgctgctgttgttgatgcaagaactttaaccagagctaatgaatttatccaaggtaatgcatattctgattactcattatttgttgctgctaatgaaactaactcaactcaattacaacaagttagtgcattaacttccgcattatacattaatgctgaagaatttgatgcaagtgtcattccatcatttgcttctcacttcggtgcatggccatctaacaaaccaattattgttgatgcaaaatccacttctcttgcttcattattattattagcttcattatttaactcaaagattcatgttactaatgttaccaatattgatgacttagctttaatttcaatgtctaagaagaagaacttaaatgttacttgtgacgtaactatttactcattattcttttctcaatctgattatccaggtgcttcattcttaccaactaaggaagctcaaaaggcattatgggataaccttgaatcaattgattgtttctcagtcggtactactccatacaaattagctaaacacttaggtgaaccaatctctgcaggtcttggttttgctgattctattccattattaatgggtgctgttaacgaaagtaaattaactattgcagatattattgctaaattaaatgcaaacccaattgctatccttggtttgagtcaatctgaatcttacattgatgtcaaccttgatagaaaaacatcaaccttaaaatcaccagttaaagtttggagtcctgttaaggatgctgttggttcagttgaaagagtttacatgaatgaacaaactgtctcattagaaggtgaatttgttgttactgaagcattaggtaaggaaagtattgctcaacatgcatcatcaatttcaaatgaatctgctgttgatacttcatcatcattaccattaggtatttcatcaccaaatgttagaagaggttcaagattctcatttgataacaatagaagacgttcattaattgattcattaaaggaaggtgaagaagaaactacaactggtgcagatttagtctcaaccaaaccaccaagagaattatcaccaccaaatgctatttcaacttacattaaaggccataatccactcttaagaaagaatattttatctgttagtcaaattggtagacgtgaattacatgcattatttactgttgcacaagaaatgagattagcagttgaaagagaaggtgttttagatattttaaagggtagagttttaactaatgcattctttgaaccatcaactagaactgcatcatcattcaatgctgcaatgcaaagattaggtggtagagttgtttcaatttcagaacaaggttcatctgttaaaaagggtgaaactttacaagataccattagaactatggcatgttactcagatgcaattgttttaagacatccagatgaagaatccgcagaaattgcagataaatattcaccaattccagttattaatggtggtaatggttcaagagaacatccaacacaagcattattagatttattcaccatgagagaagaattaggtactgttaatggtataactgttacatttatgggtgatttgaaatatggtagaccagttcattcattatgtaaattattaaaacaatatcaagttaaagtttacttagtttcaccagaattattaagattaccagaaaacttaagaaatatgttaaaggaagaaggtatgttaattggtgaaagtactgaattaaccacagaaataatttctaaatcagatgttctttactgtactagaattcaacaagaaagatttaaggatccacaacaatatgaagcattaaagggtgtttatcaaattgataataaggtcttgaatgatgcaaaacaacatatgtgtatcatgcatccacttccaagagttgatgaaattaaggaagaagttgatttcgatcaaagagctgcatacttcagacaaatgagatatggtttatttgtcagaatggctattttagcaatggttattggtgttgaattttaatcactttaatacattcaataaaacatacaaaaaaaaacaattacgaatacaataaattacaattaataaaaataagatggtagattaaaactataatgaaaatttcaataaagtatattggggaatatctttacgaataataaaattattattttttataacattttaactttacattttacagatttataacttttatatagcaattacaattaataattaattaaaattttaagaataggttcgattattcgtaaaactacattaattaaaaaaagctgaggagtatggttacaatttgaatatcttgtaagagatattaaggtttcggaaggtaagatgcaaaaactagttttaaaaacaattaactacttgtgcctcctgtcggaattgaaccaacgatcttcgcattacgagtgcgacgccttaccacttggccaaggaggcaaatatcaagctgctagaggcaaataatttacgcgttgcgtagacgtcacgtgatccagcagaaaactatctttgagtggtgctttaatgattttaaagggtcatctctggaaattttaaactgttctaatataagtaaaagatattattttgtttttccatcaaaaatagtaaaaaatacaggtgttttctttaaaaaattttgcatttttaataacatttacagctagctttggaatcaaaaaaaataattcacagactcttaaaaatttaaatttagaaaagtcattcaaaagtctaaaaataaatataattaacatgattcatagtagctaatggataaaacaaacaactaatggattgaataacttataacatgctcattatgactgacgtaaaacgtgcatccaacttgagtttgtgtgcattaggtaataaattaaaacacgcgaaatcatagtaaaatgcccaaatgtcaagaatttaatgtttgtttattaaattgatccatttagttccttcttaagtggcaagggtaaacatggttacagtcattgagagttcatcagcggtatgtatctaataagcccaattttttttatttgtgaacaatatactaacatcaaataacatagttgagaaaaaagaaaaatttaaagaaatctttaaattttacaattatggttgttggacaatcaggttgtggtagatcaacatttattaatacattatgtgatcaaaatgttgttgaaacttctagcagtgttaatgattatgaagatagagaattacaattaaggaaatgtaaagttgaattagaggataatgaaggtgttaaaattaatttaaatataattgatagtccagggtttggtgatctaattgacaataatagttcatttaaggttattaaagaatatattaaatatcaatttgatgagattttagttgaagaaagtagattaagaagaaatccaagatttaaggatggtagaattcatgttttaatatatttaattaatgcaacaggacatggattaagggagattgatgttgaaattatgaaagaattaggaggatttgttaatattttaccatgtattagtaaaagtgattcattaacagttgaggaacttaaacttaataaacaattaattagggaagatattaaacattacaagataccaatttttgaatttaataatgaatatttttcatatgatgaaaatttagatgatgaaagtattgaattaaataaatatttagataagagtataccatttgcagttatgggatcgaattcagttgttaaaggagttaatggaagttccgatgaagaaaatcatagaattagaaaatatccatggggagaagttgatgtatatgataatgaacttagtgatatgactacattaaagaattctttattaattacacatttaaatgaattaaaggaatttacacatgaagtattatatgagaattatcgtacgaagacattagcagagggtggagctggaggagatgaatatattgaggaaagtgttgttgaagagagtgtaaatgagattgatgatttaaaggaagaacaaattagaaaagaggaagagaggttaagaaagtttgaagagaaagttcaaaatgatttacaaatgaagagagaagaaattgaggcacgtgaaagagaattggcggaattagagagacgtcttgctgaacaaagtatagtataaatataaatatgtaagtatatcatacaaatacaaatagtattcagagatgataattatataaaagacataatagttaaattcaaatttaaatttgcacatgcacacgagtaaaactgttgttgatataataatatagaaattcacatgcacacgacactgacctcttttaaggcttttatatttggtctataaaaggacatgaccttgcccttgtttgtcaagtagttattatatattgattgtatatacttctcttctttattcaaacaacaatggatactttacaatctctttacaatgatgtggacttctctaacaagaagttccaaactgccctcttcttcatcgttttcaatccgctctactggaactttggggctcgtcttgaatactacactaaacttatctccaccctttgtctaggtcaaaaacgtgttgcagtttatcttttctcattgactgtcttctctctaggtttattaagagatgaactttatagagctgctcttcaagaacagaaaacttccccattattagataatgcattatctaaaatgctcggagctggtgctttcacttacggctcagctcttgtcttaggttcaatgtataagttaggtattgttggtacatatcttggtgatcattttggtttcttattcgatgaaagaattgtttctttcccattcaatatttgtgataacccaatgtatgatggttcaactctttgtttccttggtactgctctcttttatggtaaaccagcaggtctatttgccactgcacttgtttatgcaatgtacaatatcgtccttctcattgaagaacctttcactgcaatgatttacagaaacaaaaaggattgatttatatatatttttattaatcattaactttatataaatcttacttattatattatattttattttattgtgtatataaattatttaaaccaagttaagcatatttcttatgaatcgagtaacattaggtgttgatagaaccataatttcaccttctttcactatttcccaataataacctctttcaatttgtttaacagagataaaattacaaccttgaaatgtagcactgtacataacttgtaaatgcgattcaccaaatgctttctctatttcatcacgcataattttgctatcacaaacaatagtagttaatctttactttcacaatttgtttatcttccaatttctttattaactctccaattttcaaattttgatcattatccgtatatgctaatcctttaagatgtaaaagaataggtaaattcaatacatcattagtatcatcaaaaatcattttcaaaataggtactatgaacttctttataatctcactcaactcataaaagcaaacacaaatgaaatttacatattcttttttgctatccttactaaaatgatattctaatacaattgttctgaaaatatcatttaccttttcaattaatccatttttcatatatggaagaaacccataaattacatctaacgcaattattttgatgccattatttgaaatccagctaggcttttcaaacttgatttcacaaacttcctctatttgggttttgaaaaagttaagaagttcattcatttcaacattgttcttctccaacaccccacttaagttaagcaattggtttcttaggtctttagtcactaatacgtatctttcaaaactcttttcattgtttaatacgtctgaatatactttaaaaagcttgtcaatattaaaatttatactaaattctgctcccttttcaaaaatcatcttgaaacttcccttaagattcatattaaaatacattttatttatctgctcctcaatttcataaccataaacacagctcattgattcccaatcttttatttgaaatcgatttttgttaaatctaattcgacccataattgataaattgattgcaaagatttcatcatttttaactttacttgcaatttccattatattatccatagcaataacacatctatcatcaccaatagtcataactaactgaacaataacttgattcattacaattgcattcttatctccatttatgatacttttttgataatcatctataatcttttcaaacttatccttttctagctctttaataaactttgcaatttttccaaaaataagttcagcatctaattcaaactctaatccaattatacattgataaaataaaatatcaacataaaaatttatagtttgatcatctaagtttaatgataaacaatatttcattgcatttcctaataattctaaaatctgatcagcacatgtactataatatctttcaacaacattgttacatttttccttccaacggggagcaccacatacacataataaattacttgtaataatattttataacaaactcaatattataagtatttaaaatttcataattttgatccagatattcaactaatcgttttacatgatatttatttaaatttagattttgtaatttattaaacaattcctgcattacattttgaaatgaaacatcatattcacttccattgtaactaatcaaatcccaaaaaatatcattttcaacaaattcctcgtaatatccattcatacagtaaggcttttcaataacttcattggcaaatttaacgatttcaatgaaaagcatctcacttttatcattttccatcaagctttcaaagatataatacctatactcatcaaaaaattgagtgaaaaactttattagttcccaataattttagtagatagcataatattcgaatacttcctataacacatcgattaccctttctgtgtggatacttttcattatatttacaagatataacatcacataatgttattagaaatgttgttccatacttttgaaacatcgttccaattatattttcacattcctcaatggattcatttaaatcataaacgcatccaactattgtcaaaagggtgtacaacttgtcaatatattcaccaccaactgcaatgtaattttctaaaaagttgatgaatgattttaatacaagtgtatcagtggatataatactcaaattaattaatttttcaaaaacatttcccaattgactagttttaagcatttcttgagttactagggaaattatcaaaacttttatatcatcgtttttataatttttgtcaatcacattaaacaaatcaaccaaatattcccattcaactactttataatttgccaattggtgtaaacatatgagaattaatttcatatctggatcaaattcgtaatgaatgttcttttttaaatcatcatatagatttttcgcagcatcaggagacatctcattaaagctcaaaatcttctctaaaactttgaaactttcacttctaaatttccctaatcttttcaaatctaaacttgattcaatcattccccatatctgaatcctcttttccattggaatattgatcatttcatcacctaatatttccaatatgttgagtatatccgtcttacttcctttttgtaaaacggcaatcagtttatcattatccacaacaaatacaccactctcaattctcacaacatccttaacatcactatatccactgatccagtctatcaacgatatcattgatctaatgttgttcaatacaaatatgattgataacaaagtccgcttgttccgaaggtaatagcaagatgcgcatggcatcagattttgtgggaaaaattatttctcaccaagttttcgttacttgtcattaccacttgttgttcctttaatcaagcaataaatctataaaaatgtgtaagaatccaccaccagtcgagccatggttatattggttcaactatttagacaaatgcaaggtgtggaaattatggatactttaatgaataaatttggaactaatttaacaccatactttttaagtattggtgcaagtatggttggtgtgtttattggttcaatatatagtgataatgaatcattgttagaatttcagagacatttagatcaagaaagctattttagagaaatggtggagcattttgttggcaaagaaatgtttttttcagttttacaattatctattggtattatggtatttgtattcttcatgtttgccttgtttttaagaatgtatgtctcaaaattaattaactcaaataataatgaattgatagagggaatgatggaaagacttcaaaagatggaagatgttattgaattagtattaaaagataataatgcgttggatttaaaacaagtcaaattatttaaccaggagattgaagaacaaaagaaatcattcaatgatttgatcactaataaatcattagaacttgaaactaagctgtctgatgtcaaaaatacttgtgttaaagtgaagaatctggttcatgttgattataaaaaaataatggaaataagtagtaaattcactaatatcgatgaaagtgttcaagatatgtcttctaaagttgagaaaaattctgagaaattggatgatttacagaaaaaagtcgatcaaacatttaacgaggttgagggagagatgaacaaggaattgaaaaagattaatgatttgtcaaagtcgttacatgaacaaaatgacgtaaatgaattaaacattttgaaatgtaatgcaatgttaactaattcaagaatattattggatgcatcaattgccaaatttgaaaatcttgagaaatcagcaaatgaacctatctctgaagattcaggaaagttaatatgttgtttaaaggaagctgttcagttaaccgaatttttggaaaatccaactagtactaacgataattttagtaaagaattaccatttcacaacaattcatttacaaactcaataaactcacttgtttttgaattgatgaaaaaacttacaacaatggaagaaaaaatgacaaatcagctatcaatgattaataaaaatacaagtaaaatcaaaaagttggatgttcaaactacagaaaaattaacagatttgaagttttacagtgatgaatggattactgcttgggtttctgttatctatagtttatttaatagcagctttttgcatttggagacacagctttttgggattgattctatggaatatccaaatatttttgattttaaagatgctgaactaaaaaaacattctaaaattttttatcaaattatggatcaatgtaaggaaacatgtctaaaaattgtgaaagaggttaacttgctgatttttgagtattatttggtacaaacaacttacacaaactccaacacttcattattgtctatatgctataaaaagattgatgacgagcttttcaatttatttgaagattttgaatttattgttaaaaaatcagaaattccattgaagaaacaaactgagatcataaacactctatgtagacttaaatgtgacttgtcttcagacttaaaatcagatactgatagatttaatggattggtgaaacaaaatttggatgacttttatttaattcatgatacaatgaagtctttgttcaaagatacaggatccttacaaataagtgataaatccgtatcattaaattatgattctgttattgaattgagtgatcattccaattctattatttcagtttctcatgaagattcttccttttctgaaaatgattcttcattggatgattcagctttacgcccattcaagttaaattcagcaaagagaagatccagagatttagattttgttgaactataataaatctgtataattgtataatttggttaagtttctggtatgttaatactatttcgtagattcaattattatatagtaactcagagaatttagattgtgagtcgctcaatagcttaggcgagggataagtgtattacttctgttatatacggatctatatatagtatagtataaatgtgtgtcgtttgtagtcaacaacgctcgacgtccaatacctcgctcatggccattccctagcctgagatatggactatacgtcggcagtgtcgtgtgtacgccctgacataccccccctaatttgatacaattgattaatggtgtcgaattatatagtaaattaagaaaaatatgtagagttttgaccgacatagagtgtagtagtctgaaaagcaacgttcatgacgattttgtgtcaagtgtaggaaaaaagttgaatgataataaaaacctactaattgtaaccaggcatctctatgttaacatggattgcgtgcaaaaacctgtgatgaaaattcaggaaaacgctgattcatgtccttgtttactcaggtaattctgaaggataatctgacttgcagctagtaccatcggtggaatatcagtagtattgctattgtttccggttgattgtaataattcacttggaatgagactgttaagtgaattggcttcgggcaaagtggtgattatgttttcagtattggttggttctaatttggtatgagtgttgaatttaggtgaaacttcttcaataaccttggaaattaattgttcatcttcaatgactaaattaaatgctgtgcataacttggtttcagtgagtaatctcttgagatcatttccacgaagtgattttgttaataaatcagctggatttagttttccggatatgtgttctagttgaaaataacctgcattatatgatgattgaagatagtacaaacagttttgatatgttagattcagtggtttactatttgcattgaatttggtgacgctattaataactgataggttgtcacagtaaacttgtaatgaaatatttttaaaacctaaatctttcaaaattggaatttgtgctagtgcatgagtaacaccttctctcaaggcaagcatttcagaatgataactagatgttgaagtttctttaattcgatagctcttagatccacaatatttaccgtccaatatcattataaatcctccctgactactatgagctgaccttgctgcatctgtgtaaagttcaaggattgtggattcaggcaattcagctgttaactttgggaatatgtacatggagtttctggtagtgtaggcaaatcttaaaacttgaagtgcttgaaaaaattgttttggtgtaggcatggagttatactgagcaagcaagctagcatgtacttggagatcaaacctacccttatttgcaatataagtaattattccagttaatttttgatacatcttctgagaaaaaagttccattggtgtactattagttgtttgtgctgcattaataaattcttcattgctaacgataacggtgttgagttttaagcattttttaagtgcttttttagttttagtttcactaactcctaaacttcgttgaactgcttgtctcttagctttctgttctgcagttggtggagtgattatgggtggtgcaatatcttcagctgctagtggttccaattcttgcgatacatatgagtctggattcttagggtcttcgctttcaacctcaagtctcaattgtgttgctttttgtttaatcggttgaggtaatgggctattttgataatcgatatgaattgatttagcacctcgtttgatataagtttccattacttgtggtaaggtgtcaacaactgaagtaatataagttcctactccaatgcttaaattgtcagaagtttgtttgacatcgtaacctaagtaatactctggatcaggattaattttaattttgaattgttgttgcaggtacttttcaaattcactggtatcttcggcaaatgctattaaatcatcaacgtattgtgcaagaataaaagatttttcctcgttgaagtacaagcatgggtcggatggtgctttctcaagtattttgattaatgcggtatctaacgtcttgtggaattctaatggtgagcggtttaaaccgtaggtaaatctattcagtttcacatgtgtatattgttttggtatattaaatccatgaggagtaggcataatataaattgaaccatcgttgatttttgaatttagaaatgcagtggagatatcataagttgtaaatttgttgcgcgaataagattgaagattgaatattgcccataaagtttgttgttttgtcaccgggctactagagtttttatctctgtggtgcatggtgttttgatcgattgtaataaaccttgatttttcctttccagtgtcactctttctgttaaatcgccagaaaccgaatgatttattataatgttttggtatttgatttggtagaagtggtgtgaacacgtcatgttctgcaaatgaattggcttcagacttaattgcggtagaccattccggtaatttggatgcttgcttaaaattagttggaactgtatctggtgctttaagtatttgattcaatttttcagcatttggttgaaattggataaaggttaaaggattatttttatttcttttcgtaaaattggcgttgattttagtacagttgttgaaggtgcctaatctagtaaattttaatgcgatatcttctgtaccattgagtaaaccaactttaattttattgaatgaatcaattcccaagaaaaaacacgggattaatgtaaatgagttgtttgaatttttaattccataaaatccatcttcgattaaagtccgaattgagttataataactcgctcaaaaacttactgtatcaggaaattttaacttttgacttttaattttcaattttcaattttcatgattccgattaatttaaagaaaaggtcttccttgaagattaaacacgctgggatttattacaaacaacacgaaatatgtcaaaatcagtgatactacttaaaaatgaaacaacaccaaaagatccgtataaagagatttttgaagaaaaatcattagatgctttttttgttccattattagtccacaatccaatcaaccatgttgaaattgtaagttttcttacatctgaaaaatacttaaatgaattcaaagcgtttattattacctctcaaagatgtattgaatcattagatcttgtattgtcgttgatcaaggaccaatcagtgttggatcgtattttaagcaaaccagcttacactgtcggtcctgcaacttatgatgttctatcaaatttgggcttcaaagatatcagaggtggcgcagatgcaggtaatggatccattttatcagacttaatcatcaaggatgaattatttgaagaagacaataaaaacattttattcttaactggtgaaatacgtaaggatataataccaaaaaagttattatcttcaggttttgatttgattgaactggttgcttatagaacagaagttatggaagatgttgttgagcgttatactaatatttataactctatcaaagacaaggaacatgaaaaatggattgttttttttagtccacaaggtactgaaaatataactcaacacttagtcgacaataattcaaatttcaaaattgcaagcataggaccaacaacagaaacatacttacttgaaaaaggaataaaaccagactttgttgcaaagaaaccgactgcagcatcattaatagaaggtatatattagaatttaaacgtttatagattataaaaagttaatgtacatgtaatgagctactcaaaatgagtgaataattttatttaattctgaaacaactaaaatactttcagaaatgtttttgtaatcgagatccatagtaatagataagttacttttgtttttaacttcaatagatggcaatatcaactttcccacctttaatggcaccaatgttagtttaaatttatatttaagacacttttttttcataagctctttcaaattaacagaagcttctaaagttttgagtccagatataatccatttttgatcataatcgctaaatgatatttctaagtttgtatatgtatcattatcaggttctatattaccattactagattgaaatctaactttcttttcattagatgacgataaatcaaattcctcaacttgactaccaaaaaatttcaataaatgaacatctaagttaatctcaatatcaattggatcacatacaaggtattgcaacattctatcaaatttataatcgactatattgataatatttaactcaggtaaacttactggaatatccaattcttgttgcacacttgaatataataaactcttgaagttttcatcaacttttaaggaatttagggaatccagaaatttaccaatatgattgatatatatgtccttataatctggatcaaaataagcaaaaaagctaccaacatccacgtcatccctgtttaatataaaaattgtaccacttaatgcatacatgttcaacttaaaatcaaagcttttccagatatttgaaacaatagacttaacacttgaaaaattcacattttgtaaaagtgaagcatcattggcctcaagatatgcaatgaagttcatatttagataacataatatttcatcttttatcgtattatattttatctgtagtaaaacgctaccattgacaaaatcagtgattttgtaaaaaaaagtagtaccttgatccataaatgcaataatattacgtggtaatttccatgattcaatctcacaaccttttggtacaagactcacactctggatacgaactggatgttcaattgaaattgaattaatagtaaagtttgaaaatattgcaaatgagggaatatcgtctgattcatccatattttttattgatttgatggtttcatcagcagccactgcaattgggagggagctttctatttgagtaaagtacttgagagagcatgtgatttggtcatcattgcctttgatagaatcaaattttattgcataatatacatccaaaatggtattggaaacatctggtgggaaataatatgggatttctacaaacacaatagtaccaggagtgaatacatgcttcgcttttggtttgaaagatatagttttctcattctctataatatctatgtcaatagtttcataactgtcatctttatatgatttcatttgatatgtcgaagatgcatctagtttgtctggatcagtcttgatgaatttcaactctagatttgcaatttcactggatcccactattgtttcgaataagattttatctgagtttaaaaatctaagctttggaattctcacaattgcagaggtattatacatcacttgttctgacgattggtcaatatatgtttcaagtggaacaatattaaacttaaagtttactggttgattaatttctaaattaccaacactgatgatcatattagttgccttaaaatctccatataatagttttgagcaatgtaaaataatatcattattttcttcaagtaaaacttgactagcaacaaattccacaatattgttatctttatgtctcatgatcagtctcactttgtcaacattacaggctatcttagagttcatagaaattttgattttatagatatctgattcatcacagtaaacattggaagcctctttcaacttgaataaattttcaattttcatagtatgctttctaggtaattttacacataaggaacaaaacttttcttcctcaaactttgcacttttattgaccatcaaattaatataactagataataattggaagataacctgaatcaccatgggtattaacaagtttatccaaatttgcaatatatatctctaaaagtgacaaaccaatgtatttccaaccagtttcaaaaaagaaattatatgattttgccaattgatcacaagaagtttcatagtcatcagttgagtaaaataagattaacgctagttcagtcgataaagtcgctaaggtgtttgaattagtaactgaattatcatatattgaaattatttctcttgtcagctctataatataatctataaacgatttttcggtagtaaaaattctggtaagtttttcattttgaatagtataggcttctatatcaaactgaacatccactaaagtcattgaaccttttacactataacattttgaggtacccaaagcaataagttcatttctttgaagtaactttaaccttcctatatatgtcaacatatctgcatttggtatttgtgtgtcttcaataagctttgacagcctttcattatctaaaaactcattcactaatataaaagaaatttcgtttttcttgtaacacatctctagtgagttcaaaaacccaatcaatgtttgtgctaatatgcataaattttttatgaacactaaatccgtgtactttgttagcattaataaatctcgctgtttatgatagtagtacaattttaaagtaaaattagaagcgtccgatggtaattcttcatttttaatgatcttataggtattatcgatatcaatattttcaaattcagatttaggcaagtattgtgttttattgaaaagtttagaataacaagccattgcactatcatattgtgataaatcttgaaatatcgttgctgttttgatcaaatcctcattataaaatgtcaattgagtgttgattgaatgctgtaacaatgatttaattgatgtggttatatttttccaagcttcaattctgtcttcctttaacggatatattgatttgactttgaaaatattttccgtttcaaattctttattatcaaaatcgatctttaatttattgaatatattggtttttaaatatttatcagttgctgtttttaattctgaattttcaaaaaatatgataaagtatggtactgtagggttgattgattttatactacttaaccattgtaaaactaacggtcttaccttagctcgataatcatcaatggattgacaggaaatgaacataaatctcaaatatttcaaatctttatgttgtgtatgaggtatttcatccttgaaattaaaattaatatttttaagaactttcatacaatcttgattatctttccagtagaatgattgaatatttacatgtttttcaaaatctgatctaaaacctccctgaaaaattgaaaaagggtcatataatcccacatttaaattcatctgaagatcggagactccaattgacataccagctgtttagttctcaatcaaataggaatcaatgacaacaatttcttccccagtttgttctaactatatgaagagattcatgcatgtaaatggcagacgttaagatcaacaatcttaagtatggtgtacagatcgcgtacactaaaatatagcaccgcgtcgatgggtctgtttccagtaataacatgaatgtcaaaattattttgaaagttttgttgatgttttaaaactgttttacctgaatatattatagtgtaaactttgaaatacatcatataggtaacagtgtactctaaatatagggtattattatatacttgttttcaattttagaccctccattaatgagtaacaatagaaaccaaccaatggaaaattcaaataataaaattgctgtcaatggatctaatgacaaactcataatccatctttctcgaaggaacactttaactgatcaagcaactagaaaacattatgccaataatcccaatgttttatttgtgtatgatgaagatgaaacaagagaaaattccgaatattggatgacaattgcaaaaagagctaatatcaatattgatatggaagatgaatatgttgattctaattttcaacataaggagaaagattcttctgatttattaggtcaattgaaagacagatataaatcttatcaacagatgtcccagaaagatgaagatgattattataccaatttagaacgtgaatttaaattaaataaagaacgttgcaaacaacatgatctaaatgctgaactaaaagaaaaacgtatatctaaattaattgatcattttcaaaaagttaagcaaaactgcagattttaatgatattattgaaaatgaagatgatgaacagaaagaagatgattataaacaacttgaggtatctgaacattccgtagatgatttgtttgaaggagatagtgataataatatcagtcattctgattcaaatgttgcatcagaatcaagtataatcatgattgaaacggagagtgaaggtgaaaatgaagatgagatacatatcaaaaactactcagatgatgaagatgcaaacaatatgttttatcaaaaaattgataatggagctgaagaaaaagaagaagaaagtgatgaagctgtgcaacttgaaatggaagaatatatggaagataataaagatgaaggggaagaagaatttgcatatcataatataagccagagcgaagaaagcaatcaatacagctctgaaaatgaaatgatacaagatgaaccccaagatctttcattcaaatcttacaataataaatttggaattcaaaatattcaatatcaagatattggagaaaatgattctgctagtactagtgaatctgatgaagctgataatattgaagctcaaagtagcagcgaggaacaatctgaagggaatgaagaaattcaaataaggattagctctcctgaaaatgattctgctattgaaataaataacaactctgaagaatctcaagaagaatctgaagaagtagaagaatctgcagatgaaccagaaagtgaacaggaatcttcagaagaagctgaaaatcatgtttctgaaaacgattacacgtatgaaaagcaacctacagttccagaagaatctatttatcaaggattttttatggaacagaataatgatcaacaatctacaaatgacatacataatgaagaagaaccaattaccatcgattctgaatctgaagatattaccaatgcaaacaacgaagataattcacaatcaattgatgcctttgctgctgcatatgcatatgaattagcaaaactagctcaagatcaaagcaatattgataatattgaattaacttcaaacaagcccagcgatgaagatcaagacactgaccagatgtatggtggtgaaataccaatcaatgataatctcaaagaagatgcgtataacttgaataacattgaaaatttagcaaagatcaatcctgaatcattcgagaaagatgtgataatgtcagaagctgaaactaacccagccaatttagacacagaaaagaacgaatcaaatattgctggtaatgaaactgaatatatttatgtacatgaagatgaagaacctattattgatgaatctttgttccatacagcaattgaagattcagaaatccatgagtccactccagcagttgaaaatgaatcagagtttaaagatcaatacattttgtcttctccttcctccaaaatcaaacaaaaataacaatttcatacctataacaccaccacgcccattaacacctgaaccaccacaattattttcaggtttatctgctttacttaatgcttcattagaagtacattctaaacaaagctcaggtgaagttattgacagtgaactgtctgagaagttaaatcaattaaaagatgaagttattacagttactggtgatattgatgatgaagaactggaaagtattattacaaggccaacatcaaaggaagaaccagaagtgacctatcttatttctcaagagaacgataatgagacggaaattaacgaagaacataataataatgaagaacaagaagcacaagaaacacacgaagaacaagaagaacaagaagaaaaaactgagataatggtggtgaaaccatatacaaatgaagtggaaagttctaaagagaatacacctatctcagaactacaagcatctgaaagttttgccttatcggagtcatctgttttaggcttattgccatcctcaatagacgtcaataatgaaagtatcaacgaagaaaaatacataaactctttgatcaatgaaactatactggaacaagatgtcgatttagcacctcatccaagtggagtgtatggtgaagctcttgaagaatcataccctgatttgagtaatgcagatcaatcattttatgttaatacagaagatcaattagaaacaagtgaattaaatagagagtcaagcgaagatgtcaatgaagaatcgaataaaatatctgatgaagagtctggtgaaattttagatgtgaattcaaattcaacatttggtaattcaattgctgaagatgtagaaagtcaatcattaaaacgtccacacagtgaagttgaagccgaagagaatagtgaagaaggaaatgagtccattttcaagaggctcaaaggtgcattatcatctattaatccatttggaagatcattttctccaataaatgttcctgaaattacaattgaaaataaagaagagaacattgaagatgatggagttgagaataatagtaatgatttagtggaagctgcacctgataatagtatgaatttgattgattccgaagctgatgaagttaaagaagtcgaggaagagaaatcacagtcagattctgaggaatttaaagttatatctgacgagattgctgataatgatttaagtgaaaatattaattatgataattcagcaataaatgaaaattctgataaagtaattaaagtgaataatgtgtccaaggaagaagtatcaagtgactcttttgctgttatagatgaaaatccatcacaaaattttttaaatgaaaatgattctgaaaacgtggaaaacgaaactgagattatgagtgtaaaagattcttcaacaatgaatgattcaaaatatgagcatcataatgttaacatgaatgaaacggcaatcgcagaagctattctcaacgaatttattaatggaaatgaggaagcaatcatttcccaccacaatgtttacaatacaactgtagaagaaattatgaataaatcagacgataatgaaactgtaggtgaaatcaaagaagaagaactttctgaaaatgaagccgaatatataatcaaaagtgcggagaataatgaagatgttaatagaattattgctgaaaacaatgaaaatattgaacaagatagtattattgctgaagaattttctgaaaatgaagctgaaaaatttattgtggaggccaatgtaaatgaagaaactccatctggcagtaacattgaaaatgatattttgacagatgctctcccaacagatgctgctgaaacaattcatgatgctgatattaatattgaagtaaaatctgaagaaaacaatgatgaattgattgcaactgataataatgtcattgtgaaagaaaccgaagagattgtacctgatgatgctgaagagattgaagagaatgaagaaattatgcctgatattgctgaagaaaccgaagagattgtaattgatgccgttgataatgtcgttgatactgtcgttgatactgtcgatggtaatgttgatgataatgttgatgataatgttgatgataatgttgatgataatgttgatgataatgttgatgataatgttgatgataatgttgatgataatgttgatgataatgaatttatggttgataatgctattgttgtcgatgctaaagaattcgaatatattaccgaaaatttcaaccaaacttttgaaaccaaacctacagaaaataacaatatttcatttttgaagaaagtatttaacgctttatctgaattttcagaaggtgcaatgattgatccaacagaagatgaagaagaccaaaatgattatcaacccaatagtattgaatccgctaatttaagtaatgatttcgaacaaactaccaattcaaatgctgttgatgaagaagaaaatataaatatgaaagactcatttaatgatgaagtatctgtcgaatcaacaaatattcttgaagattcacttgatttatcaataaagcataatcaggttggtgaagaaaatgagggaggtaaagttttagctgatgaggcaaataattgatgttgatcaagataaatctgaaggcttagaagctgactcagagaaaaaggaatcaattatagaagtattagaagagttaaatgaagtagatccaatttttgaaagtaataccgaaactgaagaaaagaaagattcactcgattctgaagaaagttttgaaaaagaagaaagcatcgaagaagcaattgaatctgatgatgaatcaaaaacaaatgatatactcggtgaagttgaggaagagaaagataaagaagataccattaccaatgataatacaagtgatgatacaagtgttgattctagtgaatctttaacaaatgatatttcaaatactgaagatatggaatctgaaaaagtttcagtgattgaagttggtaaagatgataatacaagtctcaatgaattaatagatgattcaatttcaaccgaagaaaaggaaaataaagaagaagaagaagaagaagaagaagaagaagttgtaaccgaaagttctgttgtcagtaatgataagtatatatcaagaggattattcagtattttcagtaacttgtttggaaagaagaaatcacacaaaaatgatacccctgttattgatttgaaggttgaaactgaaaacaatgatgaatctaatgaatccaatgaaaccatcaatacaagtgttttacacgttgaaggaacagctcgtcttgaagaaatggaaaattccactgataaagaagataaaaagcgtggtagaagtgcaagtacagaagaagaaattgaagtgatgaaagttgaagagagatcaccaaaacgtttacatactgaatctaaacttacggttccaccagttgctgttcgcaccagatcaagatcaccatcaaggaaagtatctgacggaaatcgtaccttgtcatttgaaggaagttctaaatccaatctgaaattgatggctaatagagttttatcatatggttcagatgatgatccagttgatattaatgaaaatcaacttccgagaaattacccagatttagttgaagaagctgataaatttattgaacaggataatgaaaagaaaattgttatgtctgctgatttcatgacaaatactgatgacgaaagtgaaaaaagttttgcagaagactcatcatttaaaaaatctacaattggaaaagaaataaatgttaaaaaaagaaatattagattaccttccacaaatagagtattaagaaaagattctgttcaaagatctgagtcaatatcactggattcaagttcagacaacgattcagacacagaaagttcagattcagatattgaagaagttgaagcaaataagacgaaggaagaagacatcacatttgcagaacgtcttggaagaaatctagatggaggaatcaaaaacaaatcaaccagaggcagaaaagcagcaagaggtggtatgttaggaagaggagccagaggccgtggtagaggtcgtggaagaggccgtggtcgtggtagaagaggtagaagaggttagtcctactttttagagtaaactgtttataatatatttacaagtgtaattttaatgtataatgttaaatctgataaattgaatcatatctacaaccactttaatattgctttgaagtcagacatttttaattataagtaaagatctaatatttaatatatttagtgtagttttgtaaacttgatttaacatttatcgtaagaggaagagaggaaatttgaatacgactatatatacatatcaaattcagaagtcatcatcttcgtcatcttcaattttagttggacgtcttacctctggttttttgtcttcaaattcatcatcatcgtcatcatcatcatcatcgtcatcgtcatcatcatgacctaaagtattatcgtattcattcttaataccttcattacctgatgattcacttacacgttttgcttcttcttcagcaactgcttcacatgcatcgatccaactagaatatatatctataggttcggataaggtatttattgcagtttggaatgattgtccacatatcttacaggttaaagtaccaatatttgtcttcttatcaattgtacaattaatagctttttcatgattacagaataaacatgtaaattgagtatctaatctttgttttaacttcttgacaggacctcttgaagaagtctttctcttacccatttttcaattgttgataggaaaccaaaaaaaagcttaaatcctgaagcatttgaagtcggtcttatattaacactgtaatcaccaaaaaatgttatgatgagaaatgttaataaaagaaaatggcagtttcctctttgggaatcttcacattatgaaaaattttttttattttaatttttcacttttatttactttaactagctttatcttttaaatttttgtttcatttttttatctcgttgaatttagttttagtagataagcaagtcataatgcctccaagaagatccaatagagttaaagcacaagaggaagttgttgaagttgttgaaatttctaatccttacactgaagaaaaaccagctaaaactacaaaagcaaaagcaaagactaccaaggctgctaaagctaaaaccactaaagctgcaactaatactaaaactaaagcttcaaagaaagcaaagaaagaagctgttgttgaagatcttacgaaagaagatgaaaatgaagatgttgaagaaactttagcttctacaattccatcaaatgctccaattgttcaagaaataaccatcaaagataccactattgaaaaagcagtatctgcattatccaaatggaataaagataaacaacaagaatcagataagaaagatctttttgaagaagatgatgatgatatcccactatatttaagtgttacctcaaataaatatttcactgatacatctgttttaaaaccacgtatgttatccctttcacatccaatttataatcttgaagactcacgcgtttgtttatttgttaaggatgatttatttgatgctgatgcaaaggataaacttgaatcattaaaggaatcaagtttaaagaatttagctgaaatagttactgttaaagaattgaaaactgtttacaaatcttatgaatcaagacgtagattactttcacaatatgatatatttttaactgattcttcaattgctaatatgattccaaagcttttaggtaaagttttctttgattcaccaaaattcccattaactgtaaatataactgataaaaaagttttatcatttgaaaaattaattagaaattttgaaaaagcattacactctgttggtttcatgttaccaatgggtattaatgcaagtttcaagttaggtatgttaggacaagatattgaacacctcaaagaaaatattcatacaattgctaaatatttagaaaaattctctatacgattaattcaaattaaattaaaatcatctccatctcttccaatctatattaacaagaaaattttctctgatgctgatatcattgatgaaaagaataccgagagtaaagaaatagattcagaaattccattatctatctatgctgaaggtttgaaggaattgggtcttgatgaagaagaagctaatagacttttcggaggtaaaagacaatctactgctactgaaacctctaacggtaagagatccaagaaaaactaaatttgttgataaatttatagaaactaaaatttccattcatcaacattttattaaatagaactttgtaattgaaataaaaaggagtaaattaacgtatcttatatcagattataacataaccttcattggacacatacaattgttttgtttacttagttggtatctaactttcagcaactgcaagcaaccacattttcttttcctttcttttcatttaattttatcttactttttccttttatttcgtttaatattccccacattttcaaattataggtatctcttcatcacaattgttgaaccctagagtgtttcggaaaatatcctttttgattctaccgttatttgcaaagttgttgaaaagttcttgtttctttgcaaacgattgttgttcatgtcggaaaaaattcaatttaggacatagttggttttattcctttttgaactttattacttgttttcttttctaatcttttagggttcaggaaacatgtttatcatataactgattacgtaatattataattcatgcttatttcaaacgatgaataatcgagtaggctgatattacgggcaacatcgatagtctttaaaagatttattgttaaccaaaaccatgcctgataagtatcattccaatacattaataattacagattcaacactactacatccacaaaacgaggacccattaaaagaaacattacaaacattaaagcgattcatcagtagtttagacataaaacataaattacatacatgtgttcaaatacttcatttacgatcactacgtcgaatcttattgatattttcaaataatagaataactgatttagttcatgaatacctacataaacttgagattaaagtaggatttgcaagaaatgataatactttaacatactgtgatatggatgatgccgataaccatttacacatggataaaattactgatgttaaaaaaactaataatattttaaaccctataaatgaaccagataattcaccagttaatgaaagataccccggtgaagaacaagattctaacaaaaattcaagactcaaagtaccaagtccggttattcaaatgcaatccccaccaccgtcaccatatgaaggttggatatatagacctgaagatgccccaagtgatataactataggatttcatccaaaaaagctgggccatattttatatactaaagcagatgaagatgaaatgagaaaagtattttcatcaactttggatagcgatatttatggcgataatgaaaagttggacaatttatatattggtgatggtttgggggatgaaagtaccgatgaagaaatatatggatcattgtttcaaaaaccaatacaaaaaatatcgaaaaaagaaacaaatacagggaaaaccatttctgaagttgatactaaacgtcgattgatggtccctattgtggttgttgatcatttggaagctgaaaatcttagagaacaagctaagcaattcgattacggaaactaagctagaaaagattatattttttttaaaaaagaaaaatagtgtataaaataatgtacaaataatagaatgatttagtgaaattattgaaaatgattgtaaaattttaaatttccaagtaaaactgcagctgtaaaaaatagcaaaatgataatgtagaagataatgtaaggtttagaaatactaacaccatacgaataaatactcaaaaatatcaatggtgcaatcaaattcaatacatttctgattaatgcaagggcaccaaaaaattcaccatttttcccagggttagtattatattttagtaaagttgaatgaatcacaggagatccaattgacgaaattgatgccaatacaacataaacaataacaccaaagaatgaagttgagaatgaaacaaagaaagcagcaaccagttcacacacaattgatatcataatagttgtaacatcaataaaatcaacattaattggatcgtagttaaataattcgagtaaaaagtgttgtaaccacggattaaacactgttaaagcaaatgatctaaaaccggctgcaaatccaacaaacaaaccaagttgtgattgtgacatattaaattgatatattagataaagagcaacgggtaatgtagaaccaacggaacaaaagttaactaagatttcaatagctaataataaacatccattgatacgagcagacatatcaatttgatcagttggctcattctcactttctaataaggatttcaaattatcatttgttcttgaaagagagaaacgtttcttggccaatggtttcggtgttgaagatacattattagactgtgaatttgatgaatttggcatattcatagatacggctttggagcttccagtttctgttggattaaaatctagaggtctagttacccataataatttcaaagagctaaatgaatcaatataatgatgtaaacctaatttatatgtccaagattgattagattcaagttctctctgtgatctaactgaaaatctacgacttttatttctcaatttaacactccttgattcaggtaaaatgaaaagaacaaagaaaaatgataagaatatcaatacaaaactagtcatcatcaaataaatagagcgaaccttaaatgtgattgaaacaattgatgaaacaaatggacctaatgataaacctaaaaataaagcaccagttattgttcccaatgactttaatctttccttttcatgaataacatcaattgtataagaattggcaacccctaataaaacaaacattgaaccacccattgcgtctaatatagaataagcaaatacaccgggatatgtaaaatattttggagttaaaacaaagacagataatagtctagataatgcagtcatgaagaaagtgaataaaatcattatttttcgtccatgtatatcacttaatttaccaactttagttgatacaatgattttgattattgaagaagcaaagttaatccatttctgtaattgtgcattattttgttgaacttcattagatgaacaattatctagatttccatttgtaacatagcaaacaccggttaaaatcattgttagctctgaagacattgcaacacctactgagaaggaaaataaaaacagaacggaggataatagtaaaacagaaggtcttttatgccatgcaagaaacttataagtgtctctttcttccagtaacaatgcagaatcactctcttcactaaagattgaaccattatcattcaaagttaacggacctacacctaatttatttaggttacctgtagataagattcttgaaccaccatcattattagtgatgttatttgaagtattgatattactgaaaaaattaatgttattatcatttaactcatcatcactattaatatcatcaccttcatcaccagtttgagatgcataactactatttgaattactgttaaatctatcatcttcaatttctgcatcataacctcctccacttgatgataataaagccgcttcttcaattatatcatcatttatagtagcatataagtatgaattacctcttgataccttaatatggtttgtaccacctaaagaatgtttgttattactatttttattactatttttatggctatatctttggtcgggagtggatccataatgaagatcagaatgcattgtatcaacagaggagcctaaaagaggagcttcagcgggcacagggacagcctttgcctttctacttctcctatgatttttcttagccatgtataatatgtaagataggatattccaccagacagaaccaacactccagtttaactattaataatcattaaatcctgtatctccacaattgcaggtggcagtgcactaaaaaattaaaaaaattattgaaaggcaccccgtcctaaattaggcaaagaaggcgaaacactgcttattttctcaaattgccataggaagtgaaaaaaaaataataattttatttatatggtgatgatgatattattattgaatttacgtagcactacagtgctcagctgctttagacacaggtggcaacatcatatatattatactgtattactttcatatagcacagaattcaacatcgtgctctcaagttcatgtcgaaggcaaatatagacacttccaatggggtatcggaataccagaacccttcaactaaaggttctgaaaatcccttatcggcaaaagtattggctacagttataagtactaaaaattattataatacagattccatatcaaatacacttcaattaatggaggatgatttgatttatgtgttagataaacctaactcttattggtgggatggaataatgattgaccccgtgggaaatattacaagaggttggttcccagcttctcatacaaaaccttacactaaaaatgataacaataataacattagcaagaaacattcatgtcattcacaaatatttcataatgaaaagaatactgtaaatgaatttgaaaaatctaataatccaaggaaaatgagtataatgagtactgatagtaatattatacaagaagactccatgaatcatttagataaaatacctccaaaacattacaataataataataatataaacacaacaacaaatacaaatacaaataaggatgtatcaaattcaactccactagctacaaatataacacactctccaagtatatcacttcataaagctaaaagattatcgctgaaaccaaaacatcctcatcacttacaataccaaaatcattcccaatactatatttcaaaagtcccttcttcaaaatctatctctgatattcataatatgatgcatcaatctacggtatctactttaaaacacgaaccttataatataaaccatcatcatagagatgatccacattccaattctcattcattgtcatcttcagcacactcaattttcaaagagaaaaactattttgtcactaagcaagagtcattcagttcagctaattctaatcaatatgactctagacaatcatctcaagcattcacagaaagtttatctaatccaattcctaattgttttgtctcaaatgatgaagttaactcatattttcaaccttcaaaatctgaattacaaccatctttcaattttataccagtttggatacctcaatttgatcaaaattacaatacagtctatgagaataaagctttaaatgtatgtacagatgaaatcccatttatagatagtgggatatatcaatgagaaaacattatatgaatctcctgatacttctaatttaataaaggatattaaacaattgtctttcaatttacagggtagaaaaaattctgaagtctcaagtataaatctgagttcaaaacagaactctgaaggaataaattccaacatcaataatagtaattttaatagtcatagctcatcaacaaataccaatagtaatttaccttcaaaaattcaatctatttcagattcaacttcaagtaataatatgaaatcaaatcaaaactattttaatacaatgtacaatttaccaacatttgttgattcaaggccaactgaaatcttttatacccacaataccgatattttatcatatgatacttttaactcatctttcataaacttaattgataaatgcatttcccatttaaaaaatcatgataagttgaattataatttggtcatgaataatacagcaacatttttctcattatatcatcttctgggaagattgatacgtcaaaaattaattgatgataatcaattgagaaaattcagtattattttgaaaaaaattacaaaaatgtttattcaatttaaaatttgggcttcattatcagttatcacaattgataaaattgaactttttgaaagaaacctcaatgaaacattaaatatcataccatcagacaatataggtgcagattttaaacaaaattcaaaaaaagatgtttctgatagtaaaaatgaattggaaattcaaaatgatgatgttatcaccgataaaaatctcaattatcataatcaattagttgaaagttatattgaagatttgataagaattagaaataaaattgaaaaactatctcttcatttaagtactgtactatccaaattaaatttgaatcctttgaatgattcatatcaacctaataattcgaaattactgccaatgttatatccgagattcattaaaaataaatttgaagcaggtaattttaagaataagtttgttgatctaagaaccacacaaaatgatttcttcatcaatccacaacaaaaagtttcaaatattttattggatgagaatgcaatttcgaaattagaaacattagaaaagaaaattcatgtatctcttgcaagttttaatgaaattttatcaatgaaattagataatgatgcaagtttaagtgtttttcttgaggagaagaatttgaagttgcttacagctgtttatcaagcaataccattactttcagcatttgttgatttagttgaatctattgatttgactgtttttgcaatgattgataaattagcagttaaacatattgaaactgaaagaaatgatacaattgtaagtaaattggatagtacttatggtaatgaatctacaacttcaattgacccgaattctgcaaatgttactaatagtacttttgagcaaagtaaagatgaaacttttagtgattctcctatgatttcagaaactgatagatttaccgaagtgagcgatgaaaatgagaatagtcaatcattttatgatgcaactgctaaagttttcagacctatgatccaagatttcattcatttaaaacagtcaattcattctgtctttactgatttaattcttgatgcgcaaacaattactgctattgaccccgaatctttcttttcaatcaaagatgacaataatatgagtataagtcattcaaatctcaaaatattgacagaatcattaaataataacccatctgatagagttaaaattgttgctgatgttatgttgaaaagatttgagaacttggataaaaatagtcttaacgatggagttttcagtattgagccttcattgaaattattagaaactatcaagcttacaaagaatagaatcaaattggttgtcctgtccatatcacaattaaaggaagaaagaagattaatattaaactattgtacaagattaatgaataccgattttaacgttgcttcattgttcattgctgaaagacataatactctaacacccaaaataggtgatcaatcacaaaattataataataagtccgtttctactgcacgttcagtaagtaatgaaatatatggtgaacacattgatttaaacaatgattattcaaacctgccaacaaatgaattaaacaattatttcaacggtggtagtattgattcagctgttgaaaatatgaatgataatttattggaagctaatatctatagtaattatccgtggtatattgggcctgatcataatgaacaaaaattaatttttgaaggtacagttttaagaggtggcccaataaagggattaatagctaaacttatcaatccactgaatccatatgatcaactatatgaggaaacatttttatgcttttttgcaacatttatcaaacctattaagctatttgaaactttgattgataaatattatacaaatatgccagaagcattaagttatgaagaatatggtatttggttagaacaaaaattaaaaccacaacaaagaaaagttttggaaatttttgaaaaattatttgctaaattttggattgttgcttatacaagtgccgaactaattaatacttgggaaatatttcttgatgatttaccatcagttgatgagtccttgattgaattgtcaagtaaagtactgtcattcactactcaacaagaatatattgattttattgaaggtgataataaaaaagtaaaatcactaccaatttcacaattaaataataatatattacatttgaaattacaatcactggatattagctatgttgcagagcaaattactgcaatgcaatcattttattaccaacaactgaatttatgggatttgctcggtagatcatataattataataggatatttaagaaaaaaagtgaaaaaattaataatttgagagatcctttaggtacaaagaacgttgcaaattttattaaaaattgtaataatttaacacattatacaacatttatgattttgaaaaattcgtcacttgagaagagagttgaagcaattaaatactttattgcactagctgaacaattattaagaatgaaaaatttctcatcaatgacggcaattattagtggtttgggatcaacgagtatttcaagattgaaaaagacatgggatttagtcccaaataattttgtagcaaaactggaaaaaatggataacctaatgtcaattggtaaaaattatagtgaatataggaatattttgaaatttgttgagactgatggtgatgcatatttaccatttttaggtatgtatttatcagatttaagatttactacagatggtaatccagactggttaggaaacaagaaaggttccaagggtattgttaattttagtaaaagaattagcattatgaaaattatcaaagaagttgtaagttataataataatctgcatgatattaaacttgatccagaattctcaagatacatgcatgaaatgtttaaagaattacctgatgatgaaaaactttatgaattatcaattgaaattgaaccaagagttagtttattgaaaaatacaaataatgcacatgaaggtacacaaaagagtgtttcatctatcaatacggttgatttaaataatatatttggtggttacgcaggttcgatagctacggccagtagttctaaaactggtaatgatgataaaaaggatcgaacatgacttatctgtgaggacagataagataaatctacattttttgacttttatattataattatctgtaatgtaattatcaacttatataacataataaaatggtgagggactataaattaaacacttataactgatctatacataattgggaaagttctgatcttaattctttagcggttttaatagcttctttgaaggaaataagtaaatcatcttcattaattccatcattatcattattattattattatcttcatacttgggtatgtaaaatgtaagtaaatcttcattatttaaatcatcatcattatttgaactgtaagttgatgaatgaattgaattgacaaaaatatttttagaagatacagcagcagcaggaaaatttttaatggcaatacctgaatctactaatgctaaatttacagcattatgaattaatggtaataattcaataaatttagttttattatcagtattaattaaattaacaaatatatcaattgaggattttggataattatcgagtatgattaaattgttacatgcagtttctaaagtagataatatgattgaatcggatattagatactctggatcgaccactatattttcacttactttatttaaactaaaattgttcattgattgacgagttaataaaaatggagatgaatggaaagtaattttgacaacagcttttgaattgaatgcttttttaaaagatggacgtggaccatagactgatgcaagtaaaatattattacctgattggatgaatgaagatcctgtagctgttggtatatttgaaagttgtgcaaataatttattatctgttactatactttttttttcagttacttcacaaggaggaaaataaagaggtgttgcatttgatggacctgttcttctccttctatctatacctgttgacatgatgattttgtgctgtctcaatgaaaaacaaatgatgataaactgttacaaaaatacaaattacaaaaaaaaatttgttcaaccacactatgaatcaaaaatcatgttgaaatttcatactcagtgtgtcagttcgttacttttccctctttctatagtatactaaatcttctcttttataccaacaaacgacaatggactttgattggaataatatagtatcacagaaagacaagattgtcgatattattcaaaatgatctggatggtactactgttgcactggctgttggtggggttctggcaacttttttcttagcatcaactatttttggatcaaaaacaagtaaatctgatagaccaaaaccagttaaggtaaagcaagaaaagattattactgttgatcctgtgaaagaaggtaatagaatcattaaagaagttataaatgaattaaaggaagttattatacctgaaattgagagacttgaagcagatattaaaattgaacaagagggtggccaattagaggataattcatacaaaaataaaacaaaatatcgttacctttatttaaatgaaattttcttaaaaatgcttgtccgtctggatagcattgacccacatacatttggtgataatgtaagtgatgaagtaaaatcaaagatccgtgaaaagagaaaaactgctgttaaagctgtcagtattcaagataaaagacttcaaaaactcagagatttagttatctaattgattttatatatctaatacccaatgcttatattgcatatattcatcatagttacataggattatatagtttatctttattatagaattgtgcttcattaactttatcctttggtcggcttcctccatcgatttaatgggaccaattagtttacccaccaacttagtgggccaaaaaattacgtaataagaattgaaattttccatgaatttaataaattttatcaaaggaaaaaataatttcagattttttttttacttgaatatatttttatcttttgaagtatataagtcttttattagagtagcaagacactgtcttaattaccaggtagaacagtcaattatgaaggagaacaccttgtttaaactagatttattggaatctttttatttgcaaaaaccttctaggtttggtgtaactaaacaaatgatgagatctgaaaaatatcaatcaaaagcaaagaaagcattatctcaaactcgtttagaaaaacaaagacataaacttttaacattgagtagaaacgatgcatttgatttaatcaagaaacttaaagatgaagcatttcataaaaaaatatttttcattgaaacttcattacttagatgtataactaaagtgttgaaaaaggaaaaacaaaaattatctcaaaaattatctcaatcttccaaattagaggagaaagaagttgcttcaattaataaacaaatagaagatcttgaaaaattactttctaaagaacactctgaaatattatcagttaatataaaacataaaatttataaaacattaataaaattgttcccaaaaaagattgatttaaagactgaaacatttgatagtataccagaagatgaaattgaattcatcaagaacatgaaagaaacaaatccttataaaactaatggtgatgttattaataacattttatccaagatatatgcagataaatcagttaaagaagcacttgataatattcaatcatttgaaattatttggggaccgaagaaatacactaaagaatccaatgatgaagaactcgatgaatttgatgaagaagttgaaaatgatgatagtgaaagtgaaaatgaaagtgatagtgaaagtggaaatgagggtgaagatggggatgaagatgacaactctactaaaccacttgcaaacgaagattacgaagagttgtatactgattataaagattacatagcagcatcatcagatgaagaaggtgatgaaattgatgtgccacaacttgatcctaatgtcaattacaatgaaatcactgatgatgaaccaagtgaggacgaagaagataatgatgataatgaagtttcaaactctgatggagaagtatctgaaaagactgataacaagagatcaatcgaagaagatgatttctttgcttctgaacctacaaccaagaaatccaaaaaggaagagaaaaaggagaagaaaagttccaaaatacagcttcctgtacttgcaactggttattattcgggtggtgaaagtgatgatgaagataatagaaaagattcattagttgatgaaattactaatccacgtaaaaatcgtcgtggtcaacgagctagacaaaagatttgggaaaagaaatatggtaaaactgctaaacatgttgttaaacaacatgaaagagatttatctgaaagagagagattaaaggcagaatatgaagttcgtaaagcaaagagagaacaaaaggaaattgaccgtcaaagacgtgatgctgaaagattggaaaagaaacaaaaaatgcaagaaaagactatccatccatcatgggaagctaaattaaagcaacaagaatctttgaaggctaagttttctggtaagaagattacattcgactgatttatttaatcagtagttttgtatagattgtatagaaaatatagtaaccaaatgttaaacaataaaaacattaacaaacaggattcgaaatgagaacaagcatgtcagaattttttttttccaagttcattgcagatcgatttgattgaaagctttgaatttatttcagaatgaaactaatacttttctttttgtttatctaagaacaaggtgaatgaatattcataggatattcaatcacagaaaattttgtctatcaacttttagaaatatatcaatattcaaaacacagtcatataaaaagatggaaaattcatttactaaaaggtatattcctggtgtaattcccgaaattgaacttacaccaacagagagtcaaattatcaatgttttaaacaattatacaactgcatataactctacccttgaaagtgaacaaagtccgataactttaagaattactggaggttgggttcgtgataaattattaggattaccaagtcatgatattgatattggaattgataattgttcaggtgaatcgtttgttatgggattaaaggaatggttagaagaagaaaagaagggtactgacgaaacaattaataaaatacataaaattaaaaaaaatcctgataaatctaaacatttagagacatgtacaacaaaattatttggtttagatattgattttgttaatttaagatcagaatcatatactgataattccagaattccaacaataagtacaggtacaccatatgaagattctcataggcgtgatgcaacattaaatgcattattttttaatttatcaactaagaaaattgaagatttaactaataaaggtttggaagacttagcaaatggtgttttacgtactccattagatccaataaaaacttttctagatgatccattaagatgtttaagattgataagatttgcaagtaattatggattttctattgatcgattagcaattgaagctatgaagcaaagcgaaattaaagttgcattggaaactaaaataagtagagaaagaattggtgttgaagttaagaaaatgataattaataaaagaggaattattggtgtcaatgatagtattgaactgttgaaagaggttggattttcatgtgtatttgatgttggtgatagtaaagttggtgatgaatgggtgaaggaaaatgataaattattgaatgaagatataatgaagaattttgataatattaataaatatttgattccaattgtagaatctaagataattaactttaagggatttttgaatgaagaatgtgatgaaaatgatagagttttattctacagttgtttaatattgaatacatggagagataagaggataaagataggtaaaaaagatttttatgtatcatatctatgtgaattgaatggtataaaaatgcctgcaaaaatatcagagaatgtttcaaatattgttaaaaatatagaaaatgtcagaaatgatattaagaatgtatcaaatttcaaaagaagtgaaattgcattaaaatttatattaccattcaatgataaatggggatataatttaattatcaattgttgtttagaaatatttgagaatgaaggtaatgaaatgatttccatcatagaaaaatataaggacgtcttcaatataatatacgaattaaagctagagaattcatacaatgaatctattttgttaaatggtaaagaattaatgaaaattattaatagaaagccagggccatggctaaaaccattgaatgataagttatttttatggcaactggataatcctggtaagaataaggaggatatgattgaatatttaagttcaattgaaattaactaaattaataaggattacattgaattgaattattaagttagaaatagataaatattatttaatatatataagtatgtatggataagaatatatagaaataaacttagatcttagtttcattaacaccgtgtttccaaacagcaacgaaaggagtttcaccatcttctctatagttcattaaaacaatcattccatcagggtccattgattcaccagtgaagaattcccaatctttgaaagaaccgataacttttttaacataagcagcagcacctttttcgaaaactggaattgcatcagggtcagattcagctaatttagccttaattgatttcatgtaacttttaatataagttaagaaagattttttatcaaaagcggtttgttgaagtctgaaagagtaaacaacattgttaacggtttcagcaccatcttcaacatcatcatcaccatcttcagcagatgggttagcaccaatatcgacatcagcacctggtctaacagtaaccatttgacagtcagcttcgtaaacgacatcatcaactaatttgacgtcataagcatcagataataattcatcgccggagaatttgtcagtgaaaataatcattttaatataataagattgaactgttcaattgaaggaaatcaaaagagactcaaagatacaaattaaaagtaaaatgataattctgatgaaaactggaaaaccaaattaaaaataccagacagcacatgccatgcagcaaaatttttcatttttccaaattttccatttttcgggaaatttttttttctcaaaagaagatttttttttctagtgaattttctgcgtcgctgcgtcggcctgtgttgttacgtaatgttatacatgattagcttcttttacaatagctaatacgtcttctgctatctcctctctgcttgtttctggtatagaatatccttcacccaccttaactgactcccctattgcagtgtctgctacaaatcctggaagaagaacatgtatacctgtttgagacatctgttcagcaactcctcctgatttacgttttcccatatattctaattcttttcttattgattcagtaaatcttaccaatcctgcctttgatgtggtgtaaatacttgcacctatcaaatcaatatctttatcacttttagcaacaatacttgctatattaatcaaaataaatggatgtgtaatatccttcattcgtattgcattctttatgaataacttacttaatacaattggtgatgttagattaactgatattatatcattaattgcattacttgcagtactcattaataaatttttctgagttttacctgcacaattgactaaaatgttaacatccttgaactggttccagtatttctcccttatcgattcttcaattttattggaggttgttaagttgtatgcaatatagtcatgttttctctcttcgttcattggatatttttcattaagttcttggactcttgatttaagtaaattctcattttgcgataaaatcgtgactcttattccatttttggctaatgtatctgcaattgtagcacctatacctctactaccacctgtaattaaagcatgctgtttgctaattgatctaaacattattatatacagaacattttcattattcaaaaacaattttaattttaacatgaaatcaaaaccaacttgatcgcaaaaaaaataaaatattacccttttgggaaattttaaaatatttacatgtcctattaatctttattattaatttctataaacgattataaaatacaatgtctatacaggcttatttcttatgattatacaattgttctctaaactaacttccctattaacatatctaacaagactaacttcaaatcctttcttttccattgcatattttcttgattcgtcaagaatacgtctcattttcaatcctataacttctctctctttgaatgataacccactaaaatgtgtatctttaccatcattcgcatccattccaggcattacaccattagttgcccaagcaaacatctttttaaaataaataaagtttgtttcatttataccaaatttttcatttaaaaattctttagattctttcaacaaccattcatatttacaacagtgtctacaacacatagcaactaaacatccaccaaattctatatcatcactctcacacttatcatgaattgcattttcaatacatctcaaagttaaatcagttgcgacaccacagagatgtttagaaataccaataaatttactagaatcgacatccttatttaattcttttaatgattctattaatttcaaatctttaatatcaacttttaatctctctgtagtattttcacacgattcgatatctttgacaatcttattatcaaattttaaccttggattatctctatccactaataaatatttgattttcttgaaatcatctaaatatgttcccatagctctatttaaatatcttgcaaattctgcacgcccacatccaaattcaattataatattaggatttttaattgattcctttttggataaaagttcatgatttattaattgtccaattaaactactttgttgctttatatgtttttgattactaacttcagcaaatctttcctctaatccatcaacaaattcaatctcattcaacactaattccatttcattactgaatatttcatcgtgtttttcaccccacttttgaatattcttattccatttatcattatcaatttctttaatttcacttggactattaatagtgtctataacattataatcaatcttaaaccaatcaacagttttctctctttcctcaatttcaagcttcttttttaatacattacaaactttaacgtgtagtttcaatttatcttcccaaactgtatgacttggatcaatagtacatggtactctcttaataacttctccattctttttagttttagtaattccatcatcatttccctccttattatcttctccgtttgctaatttaatgtgtgcaaaacaaaatttctgccctttacggacttgtaaaccacattgcttaccattttttggttttataaaattacatttgaacaattctggtttgtttaaatttgtttcatttttactggtagattcagtaactttttgtcttttcttatcatttgtatctgttgtcattatacagaaagattggtatgaccaacttgttatttgatatgagggtgtatatatcagctaaaataaacctttagtaaactacaagaaaactgatcttgaaaaaaaagtaaaaatttgagttaattttgacaagccttctcaaagttgatattgaaaggttaatctactcaaacatgtaagagtttataaaaagcgttaataattagatttactccagttttattataaataaccagtactttttatttcaaaataatattatttataattgatgtttgaaaactatatatgcaaaaagttgtaaaattgaaggaatgaaaataataaataataaataataaataaaacataagacataaaacataaaaacaataatgtaaaattaattgaacgtaaaactgataatttcaatggttactgtgttttcttatatgtatatcaatgattatttcttttcaattgaattctctaaagttctgatatgagtttccatatttctaatagtcttttgtaataataaaatatcagaaataattgcattagatgaagttttatattcatctaataaataatagtaacaaccaaaacctgtaagtgaaacaccagcaaagaatccaaataagacaccctttaatgaacttggttttggtgatgcaaaagttgatgccattcttttgttcatgaccatttgagtacttcttttagttaattgtgcaaacattgttacttgtatacctgataaccttgattagccgtaatagaagtgactcaagtcctcaaaccctatttcaaatgtaatcccctctccaagagtctttcattcttcgatgtataaaattgagaaatttgaaatctcatgaggtcgctaatgttacccaattgggtagtattcagataactattacgtacattgaagttattaagttcctacagttatattacatttcaatagagaagtaagtaaagaaaactaaactataagatgtataaatgtattataaaaagaatatttaaataatttaatctatagaaagcacgtttaatcgaataaaccgaaacccatgtcatcatcttcagattcttcatcttcttctggtgcagcttcttcagcagcagcagatgaggatgcagcagcagctggagcagcagcagcataagcttctgggttagcaattctgtccttaatttgttcagaaccttcaaaagtgtaatcagttgcaacggataaagcaaggatgttcttgtaggtgttgacaatttggtgagaaactgcagcaacagttgggtaaccagatgctaaagagatttgagtgattgcagaaacagcagaggtgaaagtgacctaataattcatcatcagtaatatctaagatagtagctgggaataagttaccttcgttgaaaacttgtaaaatagttaaaccataagtgaatggagaaatgtttaacatgtttaataaggaagcttcagaaggaccaactttttgatctgcagataaaattttaacatcagcagtaatttcaatggtacctctagcaatcttggttggaacacctaaagcttggaagaaagaagtcttacctggttccataccagtgttacctgctggaacgtaaacatcagctggtgcaatagcacctgctcttgctggagcagcaaccttgttatctaagataacatccttaacagtctttaaatctgcattggtgaaaatgaaaccaatgttacctttaacaattggcattaatttttcatattctgggaattcagaaatgaaacctctcatagctcttctaaccatggtgttcttacccattaagataacagcatcttctcttaaagtctttctgacttcgtgcatttgttgggatgaaacattatcaacaccaacaatgaagacggatttgtattcttcaactaattgtcttaattttgcgaaatattgttctttcttttctctggtagctcccatttcgtttgtatatacgttaggctgtttaaagctgcttattaaataaaaggaaaatcaagccaatatcttcaaaatgtgtgaaaattcaacttctctacggtgaaagctctctctaattcttacttcgctaagtattttttttcatagtgagaaattgaaaaaagtttttgcgcgtgtaataaagtctagattgggaaattagggttggaatagaatttttgaaccttttaaaccctatttcccttttgggacaactacatgattatccttatcttagcttaggttattataacttaaagctgaattactactatatgcacatgcagaattgtctataaaaaaaagtaactatattctagaaacctaaacttaaactattattgacgttataactatttttgacttttcgataattcatcaatcattaaagtcattgtatcaacagcccattcaattctggaacgttgtttcttacccttgattaaattactcttcaatatcttatcattaaggaaatattgtaaaccttttaataaaagtggttgttcctcacatttggctaatctatcagaaagtactttacctgtgtattctatatttttagaacttttaactgaatcattatttgtttgtgattttttagcaattgtatctaaaattgtaatcaacataatttccaaaaatattttaacatcagatgaagctgtaagaaaattaataacccttaataaatttaatgataatgatccttcaccaatcaagaaaccaaaaaatctacccatattcaaaatcttccataatctttcctcatcattggtatcaattaatatagttgttgttccactatcatcaccgtctaactctttaatgaaatcccataaattcaattggaatgatcttctcattgcgtgatcatcacataattttttagcaaggtgtgaataatatggattgttattagcttccattgtagcacaatgcattaaaatatttggaatctctgctttttgtgatttctttaaatttaatttttcaagtttagcaaatgagtccatgaaatcttcagctgacataattgaaatgaaaatagctcttctgatatcagtattcattctacattgtttagctaattctaaccaattaacttctgaactaccagatagttcatcttcattattaattaacttttcattgacattagataaatcattaatatcttgttcgttcaaactcttcatttccttattatcagatttattatctaaacctttccatgctgaaccaactaaccaccatttacctctctcttcaatattttcaatatcatcaagattaactttaatagggtccaaacctctaccattattaatagaacctaattgcttcttaattctgttaatcatttgtaatgtattttcattttcaagattctttaatctattatttttcaaatcagtaattgtatcaattaaaaacctacttctggttgatgttttgatacctctattttcattttgtttgaccgatgtagtcaactcagcaataattgaatttaatgctgtagaatcatcagatcttaatttagaaccacatgaacgaattaattttaataaaatatcagtttttaattcatttgaatctttgataagtttcattttgattatatcatagaccaaagttgaactaactaaatttaatgtgtaaagataacctaaaagacctgtaatattcaataattcttgtttagttctagaatttgtttcaatttctttctcaaattcttcaacaagcttttgaatcatgaaagcaccaaattcaacaccttgtaatttgtataatgcaacaatagcactagcatataaaaccaaaaaactttctaacattggagttgaaattgaaactgattgaagtataacttttaaaattgcttcattgacaaaatgtcttggattatcgttataaatattgttcaaatctgatataacactattcatatttggttcagataacttattgaatggacctttgataagtcttacaagtttttgaacagtttcagaatcaccgttcaattcacccattgccatcttccttctcaatgctggaggtatatatttagatcctgcaggtgcagcatcctctgtgactgaattaggatcaacaggtgccatataaggattttctttcactcttggaccatcattgtcatctgaatcgaattctgaatcatcttcggaatcagaactttctaaaccgtacatttctctcaaaagtgccttgtcgtcttcatctaaatcatcatcattgtcaaaatcatctgaatcaacttcatcatcaccatttttagatcttccatcttttgattttctatcatcatcttcttctgattgtgattcatcttcagcttcataatcgttactttcatgttcatcagaaatatcaaaatccaaaccatctaatagatcaccaattatatcatcatcatcttgttttttaaggccttttttaggatcaatacctaactttttagcataatagttaatctcttcttcatcttgttttaataattcaagatctttttcagaaagattcctcttaatattggactttttctccttggttttatccttggtattttcttggattttcactttcttggctctaatttctgattcatcatcggaggcaaaatcattatacttatccataaagtcaagaccttctaataacccgccaaccatatcatcatcatcttgacgagacaaacctttctttgatgaaagtcctaatttctttgcgtaatatgccatatcatcatcatcttgtgaaacaaaattaggttcatcatattcttcctcagattcatcttttcgatcatcatcttcggattccatatcttcagaaatactatcatcatctaactcgtcttctttaacaatttttatgtttaatggactctttgattttttaccctttaaagcagctaattgtttcatgattgcatctctgttcctcgtctagttctgcagtttctgaattctaagtctaaatctgatgtaagttcgtcttgttcttcttcatcttcattaccatcttcggataaactatcatcatcaatttcatcttctttcactaatttttaatgaagatttttttaaagatttattacccttaagtgcagctaattgtttcataatacattcttgttcctcatccaattcctcttttcttcgttttcttcttcgttctctgaagcactgaaatcagacatactatcatcatctaaatcatcttctttaacaatcttaagaggtgtagatttgtttttctttttatttttgagagctgctaattggttcataactgcagactgttcttcatcaagctcttcctcttcttctaattcttcagatccagagttagattccgattcttctgacatactatcatcaactagatcatcttctttaacgattttcaattcacttaatttagatttctttccttttaatgctgctaattgattcataacttcgatttgttcatcatctaattcctcggcatcatcatcgtttttcaaaccatgggcatcacgttgaacttgttttaattgttttaaagtatttattaattcagatgcatctttttcatcttgaaaatcaagttcatcatcacttagatcatcggtatcatttaattcatcactatataaatcactatcagtatcatcatcattatcgtcattatcattagttaaatgatttacatttatatcagaatctaacatattgagtagagtttctctattgggtatttctcttatttgatcatgatcactaaatgatactctctttttattctttttcgaatctttatcgttattctttttagaactttcaaccttattattaaagttagatttattactattaggctttttagatttaacattttttttattattttcaaattgtttcttcaattcattggtaagtttcttcttttcacttttcttttccattctttgtctttttctgttttctttacgatgtataacagatgggccttgaagtttagcacgttttgtaaatctttcatcattttcataggatccttcattatctctaatagaatccaacattactccaggcatggagatagcatgtctttttttgctatgatttctggacatagtttattgtttttgattattgactataacttactaacctgtatgtcactatgactctatatatatcaagcaaaaaatttattgtaaagaaaacttctttcagctaaacgtctttttttttcttacttttcgtaataggaaaaaagacaacaataaaaatgaaaaaaaatatttttttaaatgttgccatactaaaatcctagataatttacatgttgtattattattattattattattatgaaggtcaatatttcaatgtattggtttttataacggacctgatctttgaattggatctttccagtaattatatttgtcttttctatttgtttgtagataaagccaatgatgcagcagaatagctctccttggaaatctttcaccggctccattttcaataagacaccagagaaacaactgaatgatggtctatcaattaatggatcaccgttacctaatactttcaaatttaccccaagtaagggtaaaaagttgtatccacatttgaatccacctgattcacttccaatttcatcaagcttgaattctagtcctgttcataatattgatcaaaatgaaagttatattaataaagataatcaatcatttattaatgcaatggactcattacaatcacaaatgttttcatctaatatatcgaataaagttatgaatgaattcagttcaagatatgaaaaggtaagagaggagaaaatcaatgtaatgcatgaattaaatatgaatacaactaatgaagaattgaatcgtagagcctctggtaggtttgcatcaactcatagaaatagattcaatagaatggagtcaattgcatttcattatacttccaaaagattaaaggagaaggaaattgaagaacaaaaggaaaaaattaaagaaagtaagaagaaggctgaccaacaaagattattggttgttccacgagatatcgcaaatgttgatgagcttactattgacgataaacccgatatggtatattctacaccaggttataaaagaaatgatttcaaaaaattagaaagtgcaacgaagagaataaaattacctgattctacatataaagaaattgattcaagtcccactaaatctaattttgaaagagaagaacttaagtcaatgcatcaaaatagaaatataccaacctatttacaaccaacaaaggcatcattaagtaaatcaacatcaagatcttcattaaatatcaatttgaatcaaccaattttagcaccgaaccaaccgaaatctataagtcgatcaccatcaatttcacctactcgtggtctttcaagaggtaatggattatctaaaatttcaccatcaaaagcatattcaaatctcaatcaaatacttacatcatcacctgaaaaattaccatcacctgaaaagtcaactaatcgtaatcaatcaacaacaataaatacaacaaatacacttacgagctaaaacaacacaattaccacgaagtaaaactacaaatatttcaacaattgatcgtagtaagacattacctaatagtgtgagtgcacgatcgtttactacttcatcatcaattccaagattagccagtttggttaatgctgaaagtcgaattaaaaatgaatcgaagaatgaactaaatgtcaaaaaatggagatactaaaatttcttttttaattcatattccttgttttgtataatatattttgtaacaaatattctagaaaataaaaaaactaaaagctagttaaatcatcataaaaacactaaaaaagttttgatctattcttaattcaactaaaataatacagatctgttcctaaattataacgaaatcgtccaagctgggactcgaacccagaatcttcagtttaggagactaacgcgttcaccattacgctacgtggaccataacttcgcttcctacttcaattgataatttctgaaaagaaaattcgaagtgggtactttaatcctcttattttaattgaactatttgagataaaaacacaaaaaaaggagtgctctgccaactcggaatggtgttttcacgtgacacccagattttaaaaagcatttttaacagccatgtagcaaggattctatgctacaaagctatttaatatacacttcaacaccctttctttctttaaaagatattttaaagccaagaaaggcttaaaaacttttttttaatattgcattttacagaaaaatgaagatctgatttaaatttatgaaaaaaatacatccaaaagttaacaaaatatctaaattaaaacattttcattataaaaacacatatacaaagcttctacactattaataatagtaccaaaataattattaaaacagtaattaaaattgcaatacagcaattaccacccatttcattagtttccataaacttattaattttcttcataccattattaagaattttaatatttaatctttccattctatcatcaacatcatttataatatcttgttgataatttaattcatcattaattgttattgcttgtttatgtaaattattaattgtatttgttaattcatttgatattaaatcatcttgttgttgtaataattgttgatggtattcctttaatgcaattggatcatccaattgtgaatttgattgtaattcattatcaacatctgattgtatatcatccttaaatggatttataccataaccaccttttaaatttgatatatttttattattcaaaatattatttaattgattatttaatgattttatcttttccttacgtgaatttaattcatctgatgatatagagaatggatttattaataaattttcaggattttcaatcattttaatactttcctgtaaatcatttatacatgaaacaatttcattttgtaatgttaaaaaatcaagtgattgtggtgatgtttgattaagttgttcaattaatggtgttgttgaggcatataatgtatcgaatggatccattgtttatatgttttgattatcgaagaaaaaaggtatagtaaactcaaatatttataggtttcatgcatgtctctaatctaagggagtgagaaaaaagaaactaattattatagcgagataaattaatgcatgattaatttgatttcatattttatcgatattgtaatttctttatcaattaacaaagatcaatatgagtgtattattacccaatgttgatgatgttagttcggatggattgaaaaggatgaatgttataatgaaggttaataacgagcaaatattttcattattaagttcatatacatgtgacaattcaaaaatttcagtagttgttaaagatggtaagattgttggtttcaaaaaaattaataataataatgataataataaaaaagttgaaattgttaaaagtaatgttgttaaggaatcaactggaacaatttatcataacattggaggtaataattcagttaatttaggtatgttagattatagattaaatttaatcaattataagcctaaaattgaggataaagatattgaaaatgttaagcaatttgaaatgattgttaaagtattatcgattgttattaagaatatagacaaggagactagagatggaattgtatgtaaaactgatgatgttatgagagaattccctggtaatcacgatgaagttaaaaaagtatttgataaaattatgaataatggaattattaaatgggaatggttcaaattaataagaaatttcaagaatagacaatggatgaaacaattacttattgaaggatatcgacctaatgatgcatatatgatgatttatagtggtaaagtaagtgaagaattacaaagaggtaaagaacctggtcagaatcaacaaaataatgatgatatagcagtatttactgagagtggatcaactacaccaattgataactgttagttctaagacaagtgtaagtagtatcaatagtcaattttctagagttggatcagtaaatagtcgagaatcaagttatgaaagggatgaaaagagtgaaaaagaagagaagattgaaaggaatgaacgatctaataagagaaagaaagttgaaataggggaagatgaagttgttgttaagagagttaaaagtaataccaatgaaagagatgaaacagttaagttaatcaaggaatataagaagaaatatgtgatatattttgaaatgtatgataaattaaggaaatgggaaagtaagggagtaaaggatgaagatagagatgttaattataatattgataaacttattaaaatgcataatgaacttgagagtattaagaggtcaagttaagagtatgagagataagttattatagtttatagtgttagttttaataaattaataaataaataaatgacattaaagaatcttttttttttccatttctatacagtaaataggattaaatctataataattttctatcaacaaattgttgataaagagcagcacctaatctaccaggagaaggaacaacttcaacatttgcagcagtcaatgcttcaattttagattgtgcggtacctttaccaccagagataagagcacctgcatgacccattcttctaccaggtggagcagttaaacctgcaataaatgaaacaacaggttttggaacatctcttgttaaattatattgtttaaggaattcagcagcttcctcttcagctgaaccaccaatttcaccaatcataataataccttcagtttctggatcattaaggaaaagggttaaagcatcaataaaattagtaccaggtgaaggatcaccacccataccaataactaaagtttgacctaaaccaacttgagttgtttgggcaactgcttcatatgtaagagtaccagatcttgaaacaataccaattttaccctttttatgaattgattgaggcataataccaattttacattgttcaggagcaataataccaggacaatttggaccaaccattctagtctttgattgacttttcaacatttgactaattctaagcatatcttgttgaggtataccttcagtaatacaaacaaccaatgggatttcagcttcaattgcttcagcaactgcagaagcagcaattggaggtggaacgaaaatacctgaagcagttgcaccactatatttcattgcatctgcaacagttgcataaacaggtctatctaaatgagtttcacctgctttctttggattagtaccaccaactatttgagtaccatattcaattgcttgttgagcatggaaagttgcttgtctaccagtgaaaccttgaaagataactttagtatctttattaattttaaggttattaatagtatcagcgtaatttctgacaatacgggtagtatgaattgatcttctgaacattgttatataatgaggtttgtgatattatacagggttacctttaaaattaatataattcaaataaaagaagaagaattaccagttataaataaccaatggtgtaaaatttattgaatgacccgcttccactgaattctcatggattacactccgccgagccgaatttttcattattgaattattattcttattataatcaatgtattcacccgggtaagttatataagtatacaggtatataggatactctttcatcgatatttaataactaaatacacatccgtaggtcaatgatctggcaccgagtaactcccaatcttcatcacttataatcaactcctctgctacctttaatctagcaaatacacatcctcccttccatccagctgtacgtgaatctgcctctccagatgacatacctgctgtaacatcaactgtagcattagtattagtattaatattattactaccattaccattaccatcattatcaaccattataatctcttccattgaacctttcttaactgcattaacaaatcctatattacttaaaatttcattacgttcaatatgaattctatcaattaaaatattctcaattccttcaattttaccaccacctccaataacacaaatatttgaataaaatttatctaatttactattatcattaccactattaatacctgcaattgtaatactttcaataattgcaatatctaatggtgtaatattcttaatattattttcctctatctctttaacattttcaaataatttctttaaaaattcttcaatgttttcacgtctattattgttactattactaacttcatttatttcatgtaaaaatttaataatatcttcatcatttttatcaacaattgaaatacctctactttgaatctcttgtaatatagataatggttctgaattaatatatcctgtaaattcataactatctcccttaaataatcttcccttactaacaatatcttccttgttctcattgaaaacttcaggataaaacatacccatacatgaaatcatattttcatcaaatatcttaaatttataccttcttgcactcttattactttcatattctaatacattaccaacttgaataactcctgtcttattatcattaaatgtacaatgttcaaaaaataaattctcaattaatttccaatcttttaatttatttaaattaatattaatctttgggaattgttgttgaattaataatttacaccaaaatttaataacatcatttagtccataatttaaaacaattctactatcttcaacaatcataccttcatcaacacaacaaatatgaatattattactaccaatatcaacaatacatccagtactaacacctaatccaaatgatgcagataatccatcttgaataaatgatacatttttaaatctaaatttattgaaaaataattcaatcatatcttcaacatatgtcttacgatataatgatggtataacaaacataatattaactttattaaattcttcattcttagttatattaaatttattctttaaaatatgtctaaacatgatttcaatatctccaagtaattcctctttactattataattatcatcatattcattaaatccaatttcaacttgactctctttaccttcttcaccatctttaatacaattgaataaaaatggtcttctaattatccattcttcttcatcctttaatctgaaaacttcatctcctataacatattttctacccatttctttaatccatttagaactttcaataaacatatttttatcattataactatcattctcaacaccttcattactaaattcttcttcatctccaatattttctaaattatttgtctcatattgttgtttcctattaaatttaaaacatgcactatgacaatttggtaaaatacgatgtttataatatctcattctctctttataacttttaataattggtttacatttatccttgaattctttttcatcctttaatgcaaaataacttttaacttttttaccatctttaccaattttctctttttcattatcatcatcatcataatcctcatcattatcattttcattatcgttttcattgttatcatcattttcatcatcatcatcttcatcttcagccttatcacctttaacaaatattctttcaggatataatccattaacatcaaatttatcacgtttttcattatttgatttaccattataattatcctttgcataaccaataatatttggaattataattggatcaacatcatcagcccaaccaactttaatatcatgactaccaggatgaataacaattgttctattttcatttaaattattttcatcatcatcatcctcagtttcagttatattaccagcaccactaattgtctctgattttttcaataattcaattgaaccagttacttgtttaatttttaaacttttattaattttatcccttgaatttctaacaattctaagattttcatctctctttaaatattctgtaaaataatttttttgattaatcaataaaacttgtggaattgttgaaaaatttaaattattttcaacttcattacgtttaataccttgttcatctaatcttaattgtaatttttcactagctttttgacgatcttgtcgacgttttaataaaatatcaggatcagttgttgtatgcgatcttttattagtattaggttgcattgttattaaatgaaggaatataaagaagaagtgtcgatggtataacaattaaatattgtaacaccttctcaccaaaaattacatgcatttctgacattcgtgtttaactacactatataacttttttacataaattatatcgatacatacaaaaatacccaatttaaaccatattttaacaagaaccagcttgttatccatcatacataccttgtatatcatttaatctaaacacattgttcaccatcatcaaatatccttataaaaaattcaactaaatttttccatctaacaactatacacattgttaaacacatcaatgaaaataaaatactcgtcataactatacctgatgttaaaactgtataagttgaaaatgataaaactgttaaaactaaccataaagtatcaggtaaattaggtaattcatgtttaataatcaatgaaaacttatgaattaaagttgacttggaagattgtaagacatatggtgtataataagtttcattattaataaagtcaacaaaatcaagtacatcattaaatacgttatcagaataggcggaaattgaaactaaatttgtaattaatctgtaaatacaaaataataacattgtaacagttaaaatacctgccagttcaagccatattggttgtctatttaatggttctaatggaatatgatgtgtatgaggaggtatatgacgatcattattatttatgttatttatgttattattattattattattattattattattattatgacgacgaccagttattgaaataccggaattatcctgaataagcgattcccaaataattctattagttaaattaccattaccatttctatttctcatattcatttgtctttcataattcataattacatctcttgcatcattaattgatcttattaatgggaaacgtatttgaatattgttatcattattttcaccatttgggaacgaattattaaccaactgattggccaatgtaatcaagtcatctatatccaattcaggtatattcacatctaactcatgttccattataccacagtctcttccttgctggtaagaaacccagtgactgtaaattgaccatttaatttattaacagtggcatgtgaaaaaaacgataatacgcggaaggctcatcaatttataccccctttctttaccttcttattattcttatccttcttcatcttgttttgctatggaacacttacccattgaagtgatacattcagttgtagacttactggatatgaagagtatactttcattatcttcatgttgtaaaaaattaaacaaaattgtattcttagaatgtaaatcattgtgtatttacactgataataatattaaaacaaatttccataattataacaattcttattcattaacaataagtgcaaataactggtatttgtttattagatatgtacaacggcatactaattgtctattaaatactcatacaattgttatcattaataaagaaagtatatttcattcaatgataagtcaaaacacaccaccctcttcatcatccacactgtcaacaacaacaacaacattatcatcatcacccattacaacaacagcattcaaggcactaaggaagtcaatcaagagcatatccactgaatacctgcctaatctcaaagatacactttatatccaatagaaacagtcgcgtctgtacatcctctatttctactactgtacaccatacataataataataataatattaaattctctcccctcatgaaaatatattacaattacaatcatcaaatttaaacctcttattactggttgattactgttaatctttcaaatattataataatcaaataatcaaataatgtctggaggtcctgttcctgtgtggaagaaatatacaactggttcaactggtatttgggaaactttcagaaaatgggcaactttagtaccaaatagatcatcaggtaatccttatgttccatattatagagttccatcaccttcaagtgagaaacatatttataaagatgcaagaacaattcctgcaagtgatattgtaaataatgatttctttgcaagagataatagaagaaatcatccacgtatttcaacttttaatcaatcacaaattggtgggttacttaaattaggtaataaaactaattcaagattaccaaatggtgatgaaggtgttaaacaattagctgttttaaaaaatgaatcagttaaattagttgatgtcttaaaatcaactccaaaggacgttctttttggtgaagttttaggtaaatcaggtgaaccaattgttgctccaagtttaaataaaaaattctctgttaaaattattacagaggaagaacatggtatgtataaagatgatgaatatcctgttagaatctttaaggcatcttgttaattgtatttattcatttttatttatccctacttattaatatttatatattctctctaacttaaaataaattatttatgaaaaattaaaagaggtcaatctcttttaatatcaatatcataaccttgtttctctgccatcaattgatgatgaacaatatcatcactctcccatggatatgctatccaacaatcaggtgtttcccttgctgcaatataatgtccctcctttgcaatacattcaggtaattcagctctcttttcctttattttattatgtaaaacaaacatataaaattcagtatttaatttaccattatctgattgattaattgcatctttaactaattcattaacagcataatgaattgttgtacgtgaatcatcaacttcatcaataattaaaatttttttaccattaagattaattttagaatcattataattaatccattgaattcttttaacttctgtaccaacttcttcttcatcatcaccccttgttttaatatcttcatataatgataaaataattgcaaatatttttttactactttcaccaggttttttaagaaatgtacgtaaaatacgtgcaggtataaatccaccacctccaattgcaattataaaatcaatatccagtgaaattattttgggtgcaatctctttacataattcatgaatatgattatatgaaatgtatatcttatcctctgacatttgttaattataatgaataaagcaaagtataactaatacatagaagtttatgataatctcacgataagaaaataataaataaacgtgtgcatcatcgataatagattaatgatttgatatataatttgatttgatggataagaaaatttatgattttttataaacaatgattaaattttataaaaaggcattatacgtaattaacattctctttgtgcaaatgattcaatcataccaatacatgattcttcatattctctacattcaacactaccatcttcattaacaaatgtatttgcttgaactaattgtttacgtggtaattttttctttaaaattatatctctaaattttaaaatttcttcaggtatctttgtttgttcattatagaaatttgtaccattaataacatcaccactacatttgtaaacatgtaatttatttaaaaattctccaattgattcttgtccaattgtttcaattttacttctatcaattttaattgttaaatcactaaaatcttcctttgtatattctaatttaacaaaatcattacctgcatctaaataatttttcaaaattgcatatcttgcttgacaatgtgcttgaccccatttatttaattttggatcatagtattccattgctaataaacctgcacgacacattgaaacatacataatataaattatatcatcttgttcttcctttgtcttaaaaccgaaaatacttaataattctctatttgtacctaaaaacattgcaacactttcagctctacattcctcatatgaacctgcaattgaaccaaattttgaaccccaagtttcaccctttttataatatgtatcaattggtttattattaagaccaattggaggattttctttatcaaaattaaaagtaccatcatctaattccatcatcaatttacctgtaccatgacctaataattcatgaataccaacttgaacttcaaatgaatcaactctatatttttcatataattcttgtaaattatcttcaataaatgaagtcttttcatttgaagattttgcacttaaaacattaccaagtgaaacatttttgaaaaccaatattaattctaattttatcataatttggaatattaataccagctggacaacctgaacctgcaaatgttaaaacttctaatgatgtaaaatctggtggtgtgaaaacatctttttcaaaatttttattccaaggtaaatcatttatataatttttagcattattaaccaattcaccaaattttgcagttctttccttattaaccattgcaactaaacattcccattcaccctttgtaccaagataatctctataagtttcaataaatccaatattagtttcaacacttggatttaaatctttaacccaatgaatttgtgattgataatgacaattcattgaacctgtcataaatgatgaaatataattttctaacattttaacttgattttcatttgctgcataatttttagccatttgtaaattttcaacaattttagtaaattcttttgaatgatcaccaaattggaaagtaagtgaacagtctctatcgttgactttgaaattaataatatcaggatagtaaccagttgcatttgaaatgaatgaacttgcaacatgaacaataaatttattatcatcattagaagattttgaaactctgatattttcaggcatgataccattagcagctaatgcagaatcaattgcttcaccttcatctttagtaactaaattaaggtaataacctgaaacgtgaccatcttctggagctccaagcattgaaattttttcatctaatgaataaattgatgatttaacattattaaataaggatgtaatttcatcattattcaattcatcaataattgattggaattgatcaattgttaatcttggaatgaatttagaatcaccgaatgatttataattacctaaattagctaaaacttgtgaagaatattgtaaataattagtaataatttcattatcaattttactaaaatatttaatataatccttatttgggattaatttatgaattttcaagattagatcaaaaataccttcactttcaggtgatactgatctaagaactgctcttgaaccccaatgaccagcttttgaaaaataatgagcatacaatttttcatttaatgataaattgttgaagaattttgtagcagataagtgcagcaattggagcatctttatcagcataatattgtttaatatccaaagacatagtttctaataaaagatcttgatgtagatatagataccaaacgagaagaagtacgtaaagaaaggcaaattaccattatcctgagaggaaaagtgacatatagagagagagtagccaaaatgacgtttttcaaaatttatataggggaattcgcttttatctctcttaagagcatgtttacagtaggtttatcttttaaataaatattacttttacaactgctatggagagacacccgcagaataaggtacaggatgaattatatgagaagagtttggtacagttgaaggaactcaatagtaatattgaacgtatgaatagtttattaatggaaactaataaaattaatgaaactggtgttttagtaggtcaacttaatagtgcatatattgatggagttgcattccaattagatttgcataaagattaaaaatttgtattaatagttttgtgtgtatatatgttatttagtatagtatataatatttctttttcttttcttttttcttaagaaacttagattaaatatctttaccaggaagcatattgaatctctttttaagggtaaccctttgtcttgaaaatttatcatcaggggagaatctagcaggatgtgcagatttagtaatttcacctgattctgtgactttctttaaagtgtatattcttttaccatctggtcctaatgtgtacattaaatgcatattgaatgtgtgtctacagaagtggtaatctctatagaagatctactggttaaagtgaaatattttaattttatttaaataattttaaagagatagaaaattttttttcactgtgggagggaagtcgcgtcgtttcagttgatgaggattttttactatattcactgtctacatgaataatgtatcagatcatggtagaggtggtttcttttgggatagacaataatggacgatatatttgctgatttacttaaaccagtggttaataaggataccagcaataatggtaataccttactgaagagtagaagtaataatgtcaatctggatctggattttttagataattatgtttcaaaacctgttaataatagtaataataataatagtaataataataataatgatttattcggtgatttattaagtgatagaccagttgaagtaagaacaataatactcaaattaagaacaattttaataataatgatgatctgttggatttgggatttaatgttaatacaaagactaataataacaataataataagaatattaataccaatacttttgatgatctacttggaggaatggaccaaaagccagtacagaaagcatcctattaatgaaccttcagcaattaagaattcaacttcattaagagattcagcattggctgaattattagatatgggattctccatttcaaaagcaaacacagcacttgattcaacttcatcaggttatgatcttaatgaagcaatatcttatcttatgaataatgcacatgaaacaaagtcaacatcaatatcaattcttttcaaaacctcaacaacctgatgattttagtaaaattgttaatgatttatcaacagattttatgtcaactgcttcatttttatttaattcaagtaaaaagcaattacagaaaggtgttgaaatgtataaaaatagtaatagaagggaaataggtgatggtacacctgcattggatgaaggatcaacatcgttatatgagagattcaattaatttacccgatgaggaagataatgattatataaatgaacaacatgaagtgatacgtgagccggaggtaagaaaacctgtacttagaaagtactccaaaaaagaaaccacaactacaacaacaaccaataacagtatcatcagcaccactaccaccaggtgaatcagtatcatcatcatcattacttgatttatcagtaccaaaattttcaattccaccattaaattcagctcaattacattcatacacatcatttaggaaaaattgcacaagaaaaatttaagagtggtgattatgttttatcattggaagattatttatcagcttctaatgatattccaattgatcatccatttcaaattattttattttcaaatatttcaataatttattcaaaacttggtaatcataaagatcaattaatttatgcaaataatggattagaactaattagtattataactaaaaatgtgaatatcaattcattgaatgaatttataattgaagatggtaaatcaatcaaatcattttggagtaaattaatgtttaaaaaggctgaaagtttagaatttttagaaaaatggaatgaatctaaaattgcatatgaaacattaatatcatctggtgaatgctcaaaacctataatggatggtaagaatagatgtttaaagagtttatcaccaaaaccagtatctaaaccaatgtctaaaccgacaccaaagtcacaaactattactatagataacaataatgaaaaattacaaagagttaaaaagaataatgaattaaaaataagggaagatgaagaaaaatttaaattacatgatataattgaaaataaattgaataattggagagaaggaaataaggataatattagaggattattatgttcattagataaaattttatggccaagtttaaattggaaaccaattcaattaactgatttagtattggataaaaaagttaaaatattttatatgaaagcagttgcaaagacacatcctgataaaataagtaataatgaaacaattgaaaataaaatgattgcaaatggtgttttcattacattaaacgaagcatgggaaaaatttaaagataaatagattaatttatattataatattatactaaactaattataaaggcataatatttggaattggacctaaaggtgtaattccatgtggattaatttctgtatgagattttgtataatgagatttaatatggtcaaaattagttgtatctttaaaagcattattattccaatataattcttttaaatattgattaatatttggataatcatgtctaatcattttaatattacatttaaaatgttgatgataaacagcatcaaatctaactaatgttggaaataatctaatatctgcttcagtgattaaattacctaacaagaatttttcacctattttcatgtctctcttttaataaatcttctaatttatctaaatatttgaaaacatttttaacttctctttcatagggttcttgctttgttgctaaacctgctttatagacaccattattaatatttgtataaatccaatcatttaattcatcaatttgatttcttaaattttcaggataaatatcaattttagcaaatttttcatcaataattgtaattaaattcagtatttaatattctaataatttcatgaactttcattattaacaattgtctctaattttttatcccataaaattggaactgtaaatctaccttgataatgtggatctgccttaaaatataattctttaactctttggtaattatataaaggatcaggagtggaaccaattgcttcagttgagccttcttcatttgttgcaaatctccaaccatttttacccatatgccaatgaactacagtaatttcaattatatttgttaaaccttttaaaatacgtgtaattaagacacgatgagcccaaggacatgaatatgagacatataaatgatatctattaggttcaggtttaaatttaccatcaattgaaattgtgtctctaaatgatgaagccagtctcttgtattcaccatcttcattagcaaatttttgaattacaattttacctgtcattataatatacgtgatgtgagctgtgtgttatgtatataaaatgtgtatgtgctgtgttaattactcaattgtaagggttaagtattgttaagggaattatataagcaattacaagtacaaattgcaggtagttatacaagaaaagagacgtgaagaaggagaagaaggtaataaattgtgactgtcataatattagttacctcgttgataagctttgttatcacctttgtttattaatagttgtaggtatattgatcatttgaagttttcttttttgaatgtatcagttacttatcatttatataccattacaattcactcaattgaactcatatgagttcatatgataaattattagggtaatgcagcatatatttatataataagtttatccccccacatggtcaaagtgagctaagttaagcatgaaaaatattgaggaaaaatttaaacagtgcaataatttacagttccagattaatcaattgatgtttattatatgattattgttattattatattgtattgtatcttaaagtataatagagggacttaatatactcaatatacttaatatacctggcggatattacattttccaattaccgggttatcaattatcacatttttaacttaattttaaatcaatcacgttgatgtactaattattatatactgttcatctaggtactttctatttacatcttatcaattaaccttaacatataaatgccgtgaagtatttaaatctttgaattgtaccgttttctttcaaattaaaaataatgtttcttttatttcaatgcttcctatattttaattatttcttaatattatctcttattttcatcttatcaattaataagaaaatctcattgaaaatgttagtatattcaattgctatttctcttttagcaacaatttcaattgctttaccattggataaagattataaaattaattcaaatgatatctctttaaagaacaatgattttgactggtcaagaccaacttttaatgatgatgcaattattgaaactgctttacaagttttacaaaatattgataattcaactttaactgattcttgtacaaaatgtaaatcaagattattatatggtaaagctttagctttatcaagacctgatttagttccttcaatttatgaacaatggtgtttaaatactggtaattactctgcttcaacttgtgcaactaattatcatagaaataccgctgataattcttcaactggttcaaattttgctgacatgttatctttaattaatcccttatcaatcgatgcagaatattggtgtcattataaagctgataaacaatgtaaagttccaaaattaccagaagatttatcaatctcccatttatggaatgatactaaacccgaaaaggcttatcatcctccaactgttggtaatgaaactatgaaagttttacatatttcagatttccatatcgaattagattatactgtcggtgcagaagctaattgtactgcttcaatgtgttgtactcctcattcaaagactaagaaaggtgctttaactgcaaatagatcttcagttgatgatttatatactgcattatttgaaggttcttattatgatttagatggtactttccatcaaggtgaaaaaattactgcattaaataatatttcagttcctgcaactcattttggctattatgaatgtgacgccccagaagttttaattaattcttcattacattcaattgctgatttccaaagagaaaataatattacttttgattttgcaatctttactggtgatttagttgatcatgatgaaattgcttatacatcttatgaacaatgtgttgaagctgaatcaattatctttagagatattaaaaatacctttgatcaaatgccaatttatccagttttaggtaaccatgacactttcccatatggtcaattagctccttataaatcaggtttccaagctaaatttgattggaatgcagatttattagccgaattatggatggattatgattggattgattgggatcaagctcaaattgctaaaactcattataccggttattcaattaatactaagtcaggtttaaaagttattgcatttaattcaaatgcttggtaccaaaagaatgaatatgcttatattaatactgttgaagatccagattattttggtacttttgaattcttagttgaagaattattagacgctgaagcaaatgatcaaaaagtttggctaattttccatattccaatctctcaaactatgatgccacctcaagcaaaattatttactgatttagttgaaagattctctccttacacaattgctcatatctttaatggtcacactcatagagatgaattccaaatcttatattccaataataatggtactaaggaatcaaaacttgaagatgaagttattaatgttgcttacattactcaagctgtcactccttgggttgaaaataatccagcttggagatattatgaaattgataccatgtctttccaagttatgaatactttcaattactacactaaattgaatgaaacttttgcaagtaatgatgaaccagtttgggaatttgaatataatccaagagatgcttatgaaattgattggcctgaaacttctccattaaatgcaacttactggcatagagtttatgaaagtattgcttcaaatgcttctattttacaacaatatgaaggttttgcaaagagatggtctccatatactgatgattgtatctcaactgaatcatgtaactgggatatctgttacgtttcttcattcactgatgatgaatatgaaacttgtatgaaaacttacaactatactgctgcatattagatctgtgatcattgcttatattttattatattatttcacctccgtaatttatttttaatattttattgtctatatttgctacatatagtcaaattcgaattaaacattattttatttttataaaaaaattagattttataattaattagacaatttccatataaatttaaatagtttaaaccgcatatctaactagatgatttacttttaacaatagaatcttcatatttttttaatgctgtgttcaatgaaaaaactaatggttcaaataattctttctcggtttccttttcctttgaatttctacaatcttcaatttgtgcttcaactcttactaaacattttttgattgaaaaataatgttttcgtaatttgattaaatccgatttaaaatttggatcagttgcaggtgttgatgatgcagttatattaaattgagtccaaaattgtcttaaaaattcaattgatgttgcatgtgttaatttaacactatctaattttttattatctaaattaatttttattccactatcttcatcttctttatttcttttattattattaccttttatagtattaccagttgatggtaatccaagtaaatcatttaaattattattgttttgtgccaatttggcattttgtttaactatattattgatatctttatatgaatcattttgctttttaccttcctctttcatatttttatatacacgtgtaagatcatatttttccttgaaggtatcttttaaatcttgtaaacttaaatcgtattcacataattcaggatttaaatttgattgattgattactttatttattaattcttgtggtattatattcaatgaaacgttagatgattgtgtatatttaagttcattatattcaacttgatttgactcatcaagatcattaagttctaattctttaataatttcatcgtctaaatcatcagtatttgttggttgttcatccgttatttcagccattaatcttctactcaatctattcattgttcttaatatcccaactaattcaggatcttgattatctttcatagttatatcaggtgtattaccctttaattgagagtcatctgatctattaccttcaatatccaaatatttaggtataggtgcaccattactactgaataacttcactttttttttctttgccattttttcagctgaaactatctttcttctttttttatcataattatttacaatatgggaattatcgttattgtttggatcatcatttattacttgctcatcatcaatttcttcttcaccatcataatctggatcaatatataaatatttatccaatgtaatatcaccacgatcataaatattgactttttcacccctcaattttctgaaaagtttactactgaaaaatcttgaccaaaattcaccctctgacattcttggaacattatcatcatatgctttacgaacaattggatattgtttaaaaatttctttaattttttctcttgtaacattaacattaacttcattatcagatgatgcaactggtttaatagtacttaaaacattatatggacctttcttttgattgttttgaattgcgaaagatcttaataaatgaattctactcttccaaaattcttctgcctccattccttccttaataacagcttctgtaaaagttctcatgagtttaacattatctcttaacaatcgttgttgaagtgctaagttcttaatcaattgcttactattcaacaattctgctaaaaatctatcatttttcaaatcattatcaagtggcggttgttctttaacactacttggcgtgctagagttattctctctacttttttcatttactgtaccattggagcttggagccggactctctgttccctctgttccagtttcctcactattgacaactttactcttctccatattgatggaagttttctttctggcaataatttgttgaatggatactttaacattgtccataacatctctactattgaaaccaaataaaatttcctttcctgtttccaatcctattttcaacatcattttatcacttgtttcaggtgtagcttttaaaaatccaacagtatctaatgataattcaactgtatttgtagttacatccatatctgcacatttccatgttaataaagcaggtgatttatcctcttcaatagtcagcatcccagcttttttcttatgcgtcgcctgtcctcttattaacgccatagttaaattatcaatcctggttagtgatgtacagtaaagatacactctaataattcaaaagatcaggaatatagctaaggataaattgcaatgatttagattattacgcaatttcttacactttttttttctatgttgattttcatacttcagaaaacctaccacttcattttagttaataagaagttgtttcttttgataagagactataccctccttctataaatcaagtatgaatagattattattaagaccctttacaagggtatccccattaatgaaaatacaacaaattccatcatttagaacattttcaataacttcaaataaattagcaatttctcgtaaacataattatgaaactgaagcaacaattactgttgatcctaagactggtgaaaaaacattcaaaaaaccaatgacaattaatacagaactacctgatgatccacgtccaaaggaaagattacaatcaattttaacatttttagtatttgcagctggtatgactgctgcttgtcttggtatttttaactatgaaaaagtttcatcaccaattatgaatgcaacaatgtatttcttaagacgtagtagtcatgccagagagttattaggtaataaaatcacgtatgatggtatgttcccttggatatcaggtgaagttaatacaatgaaaggtattgttgattgtcaaacacaaatttgtggtgataaagattccgctttaatgattttaaaggctgaaaagaatcatgaagataaatttattattattcaatggttattaattggttctaatggtgatgttgttgatttaactaatgatgccagtgttgatttatcattttaagtcaggtaacgataattaaatcagacttttttttcaattacacatattattgggggaaacaaaatacgcttatccagtttagtttaacttgtatataaaataaataaataataaagaatgttttaaaatataaataaatggatgaagctgtaaatataaattcttaaccaatgtcgatgtaatcccaatgcatttaatcataataaaaataaaagtcaaactattgtaaacataaactacacttttctataactatctaaccattcacgtcttttttgattatacttttcttcagcacggtcaacctctataattaaatggctatcattagaattaagtcttctatgaaaattagtacgagttgatgaactttcatattcaaggctttgaggtatactatcattgaaggtgatcaatcataatttcgttagtttcactgtcttcttttatatcactttcatcttcatcatcaggtttaccttcaaaatcttgttcattttcactatcaaaatccatattttctaattggaatcgttgattagaaggtggtgtatcaaatggtgaagtatataagttagcttgcttaacaggagtatcaaaatgatctaattcatgagcagcattataatcatcatcattatgaatggaaacttccctttgaaccttgttgacttatacttggtgttggtgattgaagttttgaatatcgaagtggtatttctcctaaaacttttggattcattggtgtatcatcttgaagtaatttatataaatcattattcgattgtgaagttacattcccatttttcataggagtggttggattattgaaaatattatttgattcattcattgattcaccaccaagggaagcagatgatgcatgtttagatgtatttccactatttagcgtttcatcaggtaaaactggtatcattgattgataaaatgctttaaaattttcagtactttgctgttgtgataatttacttggagaataatttttcccaatagtatttctcttgtttggtggtaatttctgtaatttatcatgttcatccttattcagcaatcttagtcccataattttggaacttttcctgaaactacgatcaccagctcggataacaactggaccatctggttcacgatcattgagatcattattatcaacatcaacattctttgcgtcgactcttttaactaaatcgtcggttgaaaaatcttttatatgactttcctttggggtatctattatatgatccaaatctagatcaagagcatcatcttcatcttgtccgtttccttccagatcttttttatatttcagtttctgtcgataccaaaaacctgcggtgactagtataaacactaaggtaggcacccctatagccattccaacggcaagccctgttgtactgtacattctctttaatatctcctctgtgtgaagaagcccaactaaagaaaacccaatataaaaaaatacccaaagatcaaacaatataataataataatcatgataataataaaatagctcttcctctaaaggtccagatcaaatcccccctacgttaatcaaaaagagaaaaaaaatttaaagttttcgaaaacaaacgcgatcttctttcatttattatggattacgtaatatctaacatctatttatctctatttacatggtcttgtgatatgtacaagtatacaatctaatctaatctataacatagtatacatggtttattttctattttgacggctttgacgacgggtccatttgtctccacgttttatcactttgattaactctttggaaaatgtaacaaaccctaatctctcacacaaacttatcaatgccttcaagtggtatttgttccacacaaatctattttgtgaacttaaaactaatttatatgcatcacctacattacctgtttcagttaatgtgcttaacatcaatctagcaaatttgaaatcagcattatcttgttgggaaggggtgagtttttgaaaatgttcagattgacggtactttccacgttctgtccatatcttttgtgcaaatgaaagacttttttgatgtcttgaagtatgcatacacatactgtacaatctatcctcacgcaatctttttccaaatgaatatttagagacggatgctttatttataatatccgttgattcagtaggttcactttcatttggtatctcctctggttcctcgattgtaacatgttcttcgtctttaatactgctattatcaaaaaccgtgagactattccattcattttcgaatatatccaatgaaccatatctaccaagaacatataagtatgcctcaacaatttctgcactgatatagttaccaccgtgaaattcagttaaatatttccacaatgcatgcgattcctttaacattaatttagtatctacaccatcaaatttaataattggtaataatggaggtgcattttcatgaaatccaaaatttgtaagttctaatactttcttacgaattgctctaactcttggatcaaccaaaccaactggcacatgtttaatatcattttttaaatcatcaattacatctccagttctatagtatgtattaaataaccatttggtacatctagcatgaggtaatgttaattcagcatttaatttagtatttgtttcacaaatattcatccaaatgccacgtacaaacggtaaatcactatcaacatatgcaagatacatcataatttccataacctgagaatcgactgggtatccattttcataatatttaattaaaaagtcccatccttgactaaccattcctctacgtgcaccacatcctttagcaagtgctaataatgcctctggttcaggtttaatatttttttcaaccatctcttcgtaaactgaaacaccatgttcaatattgttattcagtgtatccatcaacaccattgatgtataagtatgtgcagaaggggatgtttttaatgacaaaaatttcattgtatcaaaggtttccttggttaattgataatcatttaatcgtatgtacatttgcataattgatgtatatattattggtgatgtattcattgggttctcatttgttggaagtccattcagtaaattcacatatttacgaacatttttcacatcacccattctagcataatgatttaatataatcgcctttgttgttacatttgcgactaatttatcttcatgtttttgtaattcttgactctcttcattagcttctatgttttttccttcatctttattcggtggtttgaaattaatttcaatatcacttatcaaggtttccattaatattttggctttttcctttgacattaagttagttaaagccattaaatcattcataacatgaatattaccccaaagaacaccactcattaatgctaattcgtgtaatttttctacgatcttcactttatgcttccttggaatagctttaacaagttgatggaaatcatatccattaaattcattttctaatgtaagttcatttgataatggattacagataccacttttcaaaagtgcgtcaatgacaggttcccaatttgcagtttcttcacttgcaatatttgatataacttctaaaggtagtatttgtttaatgttttcaggaatttgtacataagtcttaggttttggaaaaatatctagtaaattttctggattttccaagtctttaacacttgggtcaacaacaacattgtctttatcgtttacgttcttactttcaatttgtttagcttcaatatttggagttggagctgatatacctaatgatgcaaaaacttcgtcgttatctttttcggtgggttcttcctcatctttaatagaagttgactcttctttaacttgattatgtttttcttcatcctctttcttctttatcgtttctttgatttctttagtcattttctccaatgcatctaactgtcgtgccagatctgagttaatcttgttcaattttactgattctttatcatttcctcttcgagttttagtatttacataaatatttcttattgtgatagtctgtattggcatgaatcgtatatttttcaataatgaaactcttacattcttactcaacaaaacattcctgagcatattactcattctgttcggtggtttaagtattgttgatgatatatcatagtgctacattaaagtgaaaaattcatgttccaacagaaatttttttagctctccggaaaaaaaatatttcccactgagagatcagtgaaacttgctatttgtatatagggatcacagtgatatatccttagttacatcaaaactatacttcgtaataacaatattcttctctaaatttacgaaaaataaataatgtataaaaaataaatcatattaaaccatatgaatgcaatacatgggaaaaaaacttttccatagtgtcctccccttctcctatataaacatgagctttggaatggaaaataacttgtaaattattccagccaaaatgataatctcgtataatacaagatataattgccaaaaacattttaactccacgaccatttcctaaactccaaaatacaatcaataattcaatagatttggatacaacttcatggtttaaatctagaagaaggtctaaacttgttggtattgaaagtatagagtaatcatctttaaaatctttgaacaacttgacaacagagggtttgagtaaacttttagtaaaaccttctttgaatttaactgtgaaaatatgaacatgaagccaataaatcatatctcttacttgaggagtagaatatccaacttgtatcaaagagtatgctattctagcaagttctcttaacaccgtctgtatcggtaaagctggaattttgggtagtttattaatgtcaagatttaagcacggaactggtctggcaatcggctgtagtatagtttctaatgataagagttcagattctgacaactcaatttcttttgggaacagctttttcacatctagtggtagagctttacttacattagaaatctcttcgtcagaagtctccattttctgagagtctgatcgcttgaatggtggtgtcagtagtgtgtttgagccaagtttatatattatcattttcctgaataataaaaattttcgtggacttatcaatatcagtaaccaaaatatatttccgtacttcgttacaatttgcactagttaatgcacttttctccgacaaatattttagccttgaatcacttatagcttttttatgattaactttgattttatgtttggaagattttaaggcctgtttacttgaatgatttataagctttttaaattctctttcgtgtttttcaagttctgctttatcttttgggggtatccatgaaggtctagtgactgaaagtttagaaagtttctctgtagatgctaatgataaatcatcaatacttgagattatatcagatttaacggtttgtggcatcggttgtgtttttctcttttgaagttcaccagttgcatgattttgtgatgaaaattcataaaatgttgaaagttgttgtgctgctggtgataatgcaataaatgacggatttttctgtaatgcaggactctggaaaccagtttgtgaaattgaaccaggtaatggtgatggtggtattataagattggactgggattcattccatgctttacgcatagcatctcgggattcggcgggattattctgaaatatacctaatgatgatgcagatgcaattggaacattgtacatgaatatatcatcaatgtgaccaacatcatcgtccttattttcatcgtataacttgtcacgttgctttttcgttaaatgctgtgtacttcgacgtcttgggagtctagtttgaggtaatgaaggggttgaacgaaacttcaacgatacatcaatttccagcggtcgttgattcattatttcatggtcactagttatagacatgactaatgaatccccaaatcaataccttttcagccaaaaaaacaagctgtatggtattgggtaaatttgatttttttagtgttgatgttttgttctttgagatcgagctcggtctttattttttttttttcatgcacatcaattcatggcaaactcttacaaataggaattatgtttcaattgtattataaattaaaattaaatacgttctacaatactcttgaccacagtatactcatccaccccaaaaactgatccctcacgaccaaatcctgatcttctaacacctccaaatggtaatgcagcttcacttataagtccggtgttaactccgaccatacctacatcaagcatactggatcccacacgacattcttccctgcttgaactgaaaatgtatccagctaatccaacatcttcaatgttttgggatgctttacgacatatgttttccatagaatcattgtatggacaaattgcagcaacaggcccaaaaatttcagtttcgtaaattttcatcttgtcagtaactccaccaagtacagtcatttcataaaatgaaggacctaaatcatcacgtctcttacctccaagtaaaactttagcacccttggaaatggcatcttgaacaagggaatcgactttatcaacggcttttctatgtaccaatggaccatgtgtcactgttggatccatacctggacccaaacgtacagtttctttcaatctagagacaagcaattctacaaactcatcataaacttcttcatgaatgtatatcctatttacacaaacacatgtctgaccactacttctaaatttaccagctatgagttcatcaactgctctacttaattcatgtgaagaattcatattacttacaataaatggtgcatttccacctaattccatagaaacctttttgacagttgatgcacattgctcaagtaataatgatcccactcttgtacttcctgtaaaactaatttttcgtaattctggtgattcacaaaacattttaccaaataatggagttcttttctcctcaactggtgttatattgataagaccatcgggtatgttagcttcttggcaaatcttggcaaatgctaatgctgtcaatggtgtatctgcggcaggcttgattataacagaacatccagcagctaaagctgcacctaatttccttgtaatcatagcaagagggaagttccacggagttaaaataccaactggtccaataggttctcttaaacttacaatcttcttatttggaaacgcactatcaattactgatccattaatcctacaagcttcatctgcaaaccattcaagaaatgaagcaccatatagaacttcgcccatcgaatctttcaatggtttaccattttctaatgtaattaattttgctaaatcttcactatttgcaatgactgattcatttaattttcttaacattaatgcacgttgttttggtgtaaatgtcttgaaattgaaaaatgcatttttagttacttgaaaagcttttgataattcattgtttgttgttgcattgatctcgattaatttacttccatcaaatggattggtgacatcgaatttaattgcgtccaattcattagtaaatttcccattgatgaaaggacttgtctggatcaaactctggtttttaattactttaagtgtttgaaaagcactattactataaaatcttttcaaggagacggtcattgtctaagaaagaagtgagttaacacacaatttgtgtaacattattaatttatatatttcactgtcccatttcattccgggaaatttgtctaaaaatgacgcgcctcctaaagatgatcatattacaattattcaattagactatattatgccataaaatattatcttcacttgatacgtagaattatttattgtattgaatttattaattattatatacattactattgatcattattcattatcaaaattatccttgtcagttttatacataacatttaagaaacaaccaacaagttcatcaacgacgctggaagtactaatactttcagcaacaccatataattgagcggtatcactcttaattgaatctttaccttctcttttagtaatttcaacacattctgcaacacatttctttaaatcattaattaaatcaagaattgattgattggttaattttgtaacagctaaatgtaatgcagcaggttgttgtaaactacttaaatgccaaccatatttcttactcatcatatcacctaaagcatgaatatttattacatcactcttaaatgaaataacagataataatggatcaccaataagatctaattcatcaatttcattaacaattgcatgtttaagtaattttgcattttctaaaatatcagtaataatttcagtataaccatcatcacctaaatgaatcattgtagcccatgcaccaacagtaagtgcaccaggtcttgaacctgctaaagttggtgaaccatataaaccacccacccaatcagaagagatataatattgatattttctataatctgaatttttatacattatgattgatgaaccctttggagcaaaaccatacttatgagtatcacaagagattgaagtaacaccgggtaatctaaaatcaaattcaaatgggaaaggttttttcattgccttttcataatatgcaacaacaaatgaacctaaacaacaatctacatgtaatggtatatcatatctaactgcaagatttgataattttggaatatcatcaactgtaccataagggaagtttggagctgaacctaataaaataactgtatttttagtaattaaacgtttaacatgatttatatcaacagtaaaagttttaggatctaaatcagctaataataatttcattttaaaatatttagcagctttgaaaacagcagcatgaattgtctttggtgcaacaatttcaggttcagtaatacctttttcaactctacctctttctctagcagctaaacatgcaagtaataaagattctgtaccaccagaagaagttgtaccacaaccttctggagatgcattaaataaattaagtaccatacttacaacttctgattccatttgacgaacaccagggaaagcatcagggtgtaattgattagatacagcaaatctatgataagcttcagtttgtaatttaattaaatcatcaccaccatgatagacagcaccagatattttaccctctttccaagagacggattttaaatgatcaagttcatctaactgattcataacttctttaaaacttaaaccatgatccggtataattgaatgattaacatgatcagctttaataattaattgactctctaatgaagcttgagttttttttatttccttttcaattttagatctaataactggtaatttgaaaacaagttgaataaattttcttaataatataagttgtaagaaatgttaatgatctataaataccataaccataaacattttgaaatattgggcacagtaaatatttgtataaagtgtaaacaaagagaaaatctttaaatttaattataattgaagtattaaaataataaccagcaatgtattctctcaattcctctaacaggaactctatatctacatgagatagcattgattgagttttgataaactatacaggatatatggaatttaaagaataaaaaaagagatcaatcaagacactagatcacctgaattctatatagaaaagacggaaaaccggtaacattaattaaagttcccatcacatccgagggcataccttagtctaaaaagcactgaaattatttcggtacggactttcattttcactgggggggttacaatggagtaaggccccatttctaaatccactgttattgaggtaatttagtaatggaacattctcgtgtgattgaaatttccgagagattttcaggttttcaattttctatttctctaaaattccgagacagtggagtattacgtaatcagaaagaagtaaatttttttcactcccacccttaaacttttattaattagtcaacatgaaaattgatgattcatataggaaatatcgattttatcggatttcttttttcttttttcttttttctttggcttggtttctattcacaagagtttgatctttctttagtatccaggtatatataatatataaatatgaacatcttgagatcaacaagacagttacaacatttgagggtgttctcaactaatttatctaaaagatcacttagcaatccaacacacgcgtctatatcgccaccaccttctttatttcaaaataattcaactaaacctttaaaatatcatgaattaatagaaaataaatcaccaataataaattctcctattgtacaatctgatactaaaatacgaaataatagtagtagtgtaaacacaaatataccattatcagaatctaataaattaacaatttctcaattattcataaataaatctacaagaggatcagttataaaaatagtcttatcattaggtttattacaagctattatattttttatttcatcaaatgctataatggatgaattatctgaatctgaatcaaaattattagaattatggggattttatgaacgtaaagatatttcacaaactgttatggcagttcatattggtcaattaagacaacaattaattaaattaggtgttaatcctgtaacaactacacaatctttaatggttgctcaacatttgttaagttttgatagagataatacaggtaatctattaatatatgttgatcctaattgtcaaatttataatttagttccatttagttatgaatatgatattcagaaaattccaaaattaaataatgtcgttgatacaacttgggaagattttaatagtcacaaaaatattgatatcgaaattgaaaatgatattgaaaatgaaaaatcattatcatcaactgtagctaaaaaagttgtagtatctgataaagagggaaaagaaaagaagtagaatagaatagattagaaagcatatttcataagtattctattattaaaaaatcttatatacattttataaaaagcataattaattaataataccatttaaaggaatttaatggttttatcaataccatcaaatttgttctttcttggactataatgttccggagttccccccttaataaacaatagtttactctaaatgatacgataaacataccataatcataaactacaataagaaatcggacaaagttgacaccccttgttacataatatagataatataatgattaaatcattaaatcattagatcattaaatcattttataatatttaatttatgacaagcttatcttcctcactaatgcggttttaactatcttgaattgcggttgaattgcgggtgaaatgtcagtttttattgttttcgaccgtgttacctattgtatggaccgcaaaactgtaaattttatcggcgattcacgaccgctgtcaaaagattttccatgaataattgttgtgatattataaatttctataattattatattattgataaatataatgcttatcttatctattagtccattaaatagttcaactttccaatcaagtgataaggatttagttgttactagaaaaaaatatatatttaatcggtgatttctacactttctatttctgaaataagcttagaatttttattttttcactattcaaaaattaattaacacaaatgagtatagaatctgttaatgaaaaagaaaaagcaagtgtcaatgtttcatccgtcgataattttgttgagttagatacagttatttcaccttctggtaaggttgttcatttagctcatgatgataaacatttagatgctgcacttgctttcgcaagagagcatggtagtattgatgtttcacctgaggaagacaaaaaagtttgtagaaaattagatcttatcgttatgccattattctgtttcctttatatgaatcaatttatggataaaacaagtatcagttttgcagcaattatgggtattcaaaaagattatcatatgaaaaatcaaatgtattcttggacaaattcaggtttctatcttggttatctttttggttctccatttgctgcagttattcttccaaaagttccacaaattaaatttgtttcaattgtcatcattatttggggtttagttcaatgtttacattgtactccaaaaacttatgctgctttcatgtttttacgtacattccttggattccttgaatctttcgttgctccaatttttattattatcttaaatcaatattataaacatgaagaacattttggtcgtactggtgttttctatggttttaatggtatgggtagtatatttttatcaggtgtttcatatggtttatataaacatggtgaagattatgcaattaaatcttataaaattttatttttaattattggtttgatgacaatagttaatggatttttaattttaatttttattccaaataagccaactgatgcaaaatggttaagtgaaagagaaaaggaagttgttattgaaagaattagacacaataatcaaggttacggtaataaagtttttaaatgggaacaagctaaagaagttttaattgatccaagaacttacttatattttttactttcattatcagttgcaattccaaatggtggtatttcaggttttggttcaattattattaagagtttaggttttaaaactgatatgtcacttttattaaaaatgccaagtggcgctattgaactagttggtttagttgcattaccattgatttcaagatttattaaatcaagaatggcaattgcaattacttatatcacaatcattttagtatttatttgtgttttagctttttcatctactaaatatgctgaattagtcggtttctggattttcggtgcttcaccttgtggtattattttgaatcagttcttgtgttacttcaaatactgctggttttactaaaaagatgatcactacagctgttatgcttattggttattctgcaggtaatgttatcggacctcaaactttccgttcatcagatgctccaaaatataataaggctaaagcaggtgcagttggttgttattgtgctacaattcttttaatggctatcttaacttatattaatattagagaaaataagaagagagataaagcaagagaggcattaggagataaatatgtcgttcctgaaaatattgaatttgctgatcttacagattttgaaaatccagaattcagatacagaatttaaacttgctttttcttatattactaaatattttatttacttttcttacttatttttattctttgtgtatatatgaggaaatttttataacttttttgtaactggtgttcctcatatatatcctatataactaatacttatatatcttcaattagaccaattgtaattgatgtttgctaactttttttttccattattacttgaaaaatatcaacactttccgcgaatttgttttttaaaaaaaataatagtatgtatggtattatgtaatcaataacaaaaaatgacttcgtttcttaaaagaatgatgcatttataacaattttaggacaacatgaatatcgatgttaatttcccttatcgggattttcttactttttttctattctatcattatattgagtttgaataaaattttatttctgttgataacggatgatataacattttaatagtctcaattgataaagatatatatatatatataatgtcatcttccatagtcggtgtaactagatcgatatctgcttgtaagcggtgccgacagaaaaaagtaaaatgttcacatgaattccccaaatgtaaggcttgtaaaaaagccaatgttgaatgcgtttccctagatcctgcaactggtagagaaataccaagaagttatattgttcatttagaagaaaaaataatagaattagagaaatttataaaagatagaaatctaaagatagatgatgcaaataatacccaaatagactcatcatcagtatcacaagaatcatcgcttgaatctgaaaacacaaaaatcaacaatagttcggatgaagaaagaaaaaactataaagagaacaagaataaaaacacatacgctaatgacacaagtatcaacaatgaggaactaatcaattctatcaactcttataaaaccacttctcaaaaggatgaatgcctctgtcccgacaacttttagtggtgatgggataagtttctcaaaattgatgtttgccgctgttcattttaaagactcacaagaccaaaaaactgatcaaagacgaaggtcttctggagtttctaaaaatttagtaacaccgattgatcctacaacaagttcaaaatcatcattttctgaaaatgttgctctcttacctccaaaacagcaagcacttgactttatttctctttatttctctcaatctaattcgcaattaccaatatttcatagagaagaatttttcaaaaatatttttataccaatatatggggaaatcccacaatcatctacaattgctttaaactatcctgaaaccgactggtcaagttttcctaaagttaaagaagatgacacttggtattgtcaatacacacgtttacttgatgctgaaactgcagttgatcctgacatggatcctttcaaattttctgcaaaggttaatgttccaaaaagattcagaaagtcattatactttataaatattatatttgcccttgcaagtagtacttggcatttaaaattttcccatcatatatctgaaaacttcaaaaatgctgccttgttacatattgaagaagcttattcaagtaatgatagattagaagctctacaggcaatgttatcattaacattatattcattaatgagaccttgtgttccaggtgtttggtatcttttaggatcttctatgagattatgtattgatttaggcttacataatgaaagtcttgcttcttcaaacatggatgcctttacaattgatatgcgtagaagattattttggtgctgttattcattggatcgtcaaatttgtgtttatttaggaagaccttttggaatacccgaggaatctattaaagttgattttccttcaatattagatgatgaattcattaaattcgactcaactaagaaaacactttatgaaaattcacctgcaagcaaagtgccttcgtataagaatatttcaatggcaatgttcaagattcgtaaattacaagctgaggtacagagtattttatatgataatagaacattacctagagagtttgattctttaactgattggacaaataatatgacaaaaagattaaaagactggaaatttaatatacccaaaacatccaaaataacaaactgtgatttttcaactgaattttttgaacttaattattatcacacaacaattctacttcatggtttatctcctgctaggtatgcattatcaaaagaagattttgtgaacgttgctgaagcatcgaagggtgttttgttaacttttcataagttgtggaatcgtgcggcgttaaattatacctgggcggtaacacagaatgtattcatgtcacaaatgagctttctatatgcagtattcaattcagaagatgtttttagaatcactcccttaagtgagatagagcaattcgcaatttattctaatcgaatattgaaaagtttgattgttaaatgtaatgcagctaagaaatgtcttgaagttttaactattttagcacgggctgttattaagttgaaatataaatatgaggaatcaagtaaaatcaacacttttaaaacacagatcagtaatacagatatggccaggctaccttctgaggaagaaattcaaactttacaagctggtggtaatgttacaggaaatatgagaaggttaattgttagtattcctgaattaattaattctgaagagaaaatgtcttcaaataaacaatctacaaagaggtccaaaaacaataattttggttatactgcaagattgactgctagtgagttaacacctcctcaacataaatcaaatatgcctgggattaatagacccgaaagcagacaatcagaaaatagtgacactgctgctgaatcggtgtggagtataaatggttttgatttagataacttctttgagagtgttaagagagttgagtcaccatatagttcaagatccataagtgaaaattcagtaaatgataatggaacctcttatattcgtggggctgaatcatcatcattatctgcattaaactcaaatcaacgtggatcaactaatgatgaaaaatattctttaattgatgaaagtaatacttatggttggaaaaatggtacctatctttctattccaactgcaccgcaatttatgggtacacaatttcaaagcaaacctcattctatcaattctccgataataggtacaatcccagattttacatcaataaatcaccatgtgccgttttataatatttcaactggatcaccaatgtactcttcatcaaatggaactcctgtgaatcaatatcaaaatattggagatgtgataaatccggtgaattttccacccgttaaaaatgatgaaactgctttgaataatcctacggggtataatgttgaaagaaaagacagtaaagaaggtcagagagttttcaagttgatgtttgaaacgggtacagaaagtatttgggatcagttttttgctcagccatttaaattggatgaaatctgaataatttatcgttaattttatctatatctctataatttgttctatatacatttttaaaaagtttagagtgtgtgtttagtccatgattttggtttaccatcagaaaaagaggtttcaacttcttcaacgattggttgtgcatgctgttctggttgtgcaggttcttcggtttctgatgatttttcaatttcatcaataagatcagcaggtacggttgtttctaacatgaatacttgtttaattaatccaacatgaacatccgggtcaccgtggcatgaatggaaagttgtatctaaaactgaatgtggaattaaagaagcttcttccactttgaaatctggattaacaactgcatttgggtcgtattcttcatagtcttcaaaattttttcctctaatttatcttcaattacttcaggagcagtggataatagttctgatggaaacatatcaagtttatccttcttcgatacaatttccggctctaaaactttctctgatataactggttcttttgcttcaactattccaactgctttttcagtcttagttgtttttgggacatattcttctttaggttttggtacaaaatttgctatggcttctttttcaaattctaagttaacatctttacccatttttctccagattgcaacaaagccaccacctacagttctaacaccaactttaggtctaacagaataaccaactttaccagttgatcttatagttgctcttctagtatcccattcctttaatccaccacctgcaccatctaataattgaacagttttttcatgttctaaatgtaatgaagtcggtatgtctaacttagatagtctttcgttttcttcaactattgcatcaattgcatcaataatttgtgttatacttggacagaaaacaataataaaaccgtttgttttaacatatggagctaatttaatcatatgttcatgatatcctggcatatctaagaaaacacctgataagaatgcatttggttcatctgaatcatattcaagatttttctctctcttggaaactacttctctttcaacccaacttaaaccttcttctgaattaatccaatcaaatggtgaatcggcaacatggaattcaatatcatttgaatacatacctcttctaaaacctttaacggttcttttacctgtgatactatgatttttattacaatccacactatgtaagactgcaccacgtaaatttagatcatcggcgtaatgtgctaatgcattggctggatgtaaagcttttgcaatagctattgacaaactgccatgacctgtaccagcctctaaaaactgcaacggagtaattttttcaccttcattttttggaggttcgggataatgaatatttaaatcagtcaatgaaacgattgcttgtgcatcaaatgtgtaaatgggttgtgcattccgttctgaaaaattaatccattgctctaaagttggatgtgaaactgtatatttagctaattttgagtgtgtttctaaagtatgaacatgaccaagaggttgctttcccaatacatcagtatgtttgatacttccaaagttcaaatttattttagcattagctgtatccttcaacggccttgataaccagtgttttttatcataagagctttttaatggtgtaattattgcataatcaccaggttgaaacttatttgaattaaaccttttttgagttataaaattatttttggttatcttacaaccacggatcatttcctctctttgtcgataactgatcgatgcagtgaaaaaaattgaagattgaaggatctgaataaaaatttcatgttttgcttaataaaatttgttttcttagtaatgcgagtaatctgggagggtgtttagttttgagtaaccgatgaacctgaggattctttagaccttggtgggtaacgtagatattttcatggccaaattggtggttagtgaattggactctattgtaaatgatgagaagaaaacgttatgtcgaataattggaagattgattaattatgatgtatctgaaggaatttttactctggagagtatttatgacaaaagtagatgcaagatccatattgatatggaaactgagactgagaaatggagttcacttccaacatttcttgagggagaaattgttcaaatacaaagtgcaacattctttaatggtttaaatagggtgattatgtgtcagatgattgaatcaattaagttacctggtatcttaaatgataaatctgaaacaatattgaaattttcaaatcttaaataaataataaatttaatttaatttaatatatgtaaatagataaataagatattttgagcggcgtaaattacatgatatatacgatatttgaataattaactgagtaaagtgatctggagatatacatagtttaaaatgataaagcagcatgataatataaaggataaaatttataaagtaaaccaaataataaatgcttaaatttagaatctgaccttgcttcttctcttgtttttgagtaagatagtttgtggttgttcctcttcttcttcttcggattgttcttcttcttcttctgatatatccatttcttcgtcttgttcttcttcttcttgtctttgtttttcttctcttgctaatctcttttcttccttgattcttaattcgacttctctcatttttaataattctggatggctttctaataatttcttatctaatgcaagtgctctttccttattacctctcattctattcttatagaatgcacgttctcttctttgtctaatttcttcaattcttgacattgcctttaatgtagtttcaactaattctctattatatctgacaggaacatttcttctcttagcaaatgttaatgtggaatcaacagccaattctttaccagcagctttacggaaagctttagtccatttaagttttctaggatttcttctttgtttaaaatttttatgacatttggaacgacagaatttgaattcttttgcatcattacgtacaaaagttatcccatgaccggggtatactggagatgaacagaagtgacaagcgtaaattctcattgtttgataatgattcggatacctttagaggaactcaagatgaacagtatatatcaatcagttccagttacaataaatgaaaaattttattttcttagttaagggagagaaaaaatttaaaaaaaactttttatttcctaattggggattttcgcattttctcatttatttttcttgtttttctactttattatgattaatccagtgggaggaaagaccgttgtgttgaaatatacaggtaactgtatcttcttgagaagtaaggaatagcatcaccatgagctcaattgaaaaggatacagggtctctagagactcagagtattattgatcaactctctttacaacttttgcaacagactgaattgacaaacactttacaatctaaaatcgctgatctaaatagaatggcatctcaacaaaagcaacaacttatcaacgctcgtaaggagaaacatgatgccgatcttgaagttatgagattgtcaactgaagttgaaaacattactcaagaattgtttgaacaagctaatttacaagttaaggaagctaatgagaatgctcatgatattactcaattaaatgatcgtttggctcaaacgataaaggaaaaggatacaacgatagaaattttacaatcagaattaagtaatttaaaatcaattatatcaaattttgatagtgcagctaatacacctttaaatgaatcccagaaaaatttatcaacccctaacttattatcccactcgataactaatgataaagaaggtattgttactgccgattctccaacacttccaattgaggcgtgttttaattcaacgttactaacacaatataatgaacaacaaatatactcaccattatataatcaattaaggtttgatttacctgctttccaattgttcagttcagccttaatacactcaccactatcatcatcgacacattctacttctaaatcatttgatatcaaaaccagcaaattttttatcaagttattagatgaattagatgattgtttgaaattagagaaagctccagctttacaaactattaaactgcgttggaataggaaatcattcttacttgatttaatggaaaaaacagttaatattgaaccattgagtgctgcaactgaatcatggaaaaatcaaacattacaaaaatttataccacaagttacatcaaatccaccaactccgataataccctcatccaatgaaatgccatcattaagtagatttgcaacatctaatacatcagtatcatcatatgatccttcgatgtttaaaaatgctaatgtttcaagtaatattacgaaagcttcatcaaatgctgcaccgttggccgttaccgcatcatgtggattgtgtggtgagaaaagaaaagatatgaattattcaagattatatcatttacgtatagtatatctgtcttcagaaaacaatgaagaaaagcaaacaaaatctgattatcctttatgtatttattgcgcaaataaataccgttcagttgttgaattattgaaatttgtttccaatataaatccgattaaattggctaaaggaacagaacttgatgattatattagaagttcatggataaaatatgttaatttaagagcaaaagtctggtttactacagagattggaatatggagtgaaaaggaaatgtatggattagtatatggatggcaaaataattggttgactaatttagctcccactttaaaggataatgaagaaatctcaaataatgaagatatggaaagtcaaactcaagaaaacgaaattaatgatgacaacacttcagtaaacgaaacctcgatggctgaaacaatagttgaaacagtagaagtggtatcagtcaacaaatcattggacactaatacagattcacacgataaccgagaatcagaaccatcatcaacctctcaaacgagtagtaaaagtcataaaggatgggacggatggtccggagtcattgctaaaccaaaatctgaaatgacagttgatgtaggtattggtttaataagaaaagtgagtaccaatagaaaaagccagtatatagaaaaggaaactttagatacagaagataataaagaatcaactgatattgatgaacaacctactagtatcagcgcaactagtagcagtgaagactttcaagatgcaatagcaatctcctctaagagtgattcagttgaataactttagaattgtgtagatgtagtggatgtaactgttatagcttatattgcaattttatgtaatgaaatttgatcaagtgtaataattattttgtgatggcgtgaatttttaattttaaagatcctgttgaagaggtctgaataagtgttctgtttaacatcattcttttcctaaacaaatcaattgattatgcctgacctagtgttctcatctaaatcccttttagaaaatttgggaaaggaaaactatcaattagttgatgaaactatagaaaatgatgagaataaagtttctgacgaaacatccggaaacactgaccaattcttattatcatcaacactgaacagtgtgccaatagttccaaaggatgctaaggtatcagaaacgagtgaagttattgaaaaagaaagtgaggaaactggtgtggtgagtgacattgcatcagtagaattatcagatactgattcaatttcaaatggattgatcatgactccaaatgaaaatataatcaccccagtgaaaagtaaaactttagaattactaaaaatattaaatacatccaatctccttaattcacatgatctactgcttgcttcttattatgaagaacataagtacgatttgattacacaaaaaaggttaataatgcgtgttataacctggaacttaaatcaaatgaaaccaccaaacttaagggaattggcaggtgaatctggtagggaatgggcatccttcttttatgcaggtgatgaaactgtatcaaatgaaaataaggaaggtcttgctgatttatattcaattaactttcaagagactatttcattaaaatcattttcaaaatctacaaatgcaattgatgaatgggttgattttcttttacaagttttgaatgcgatttcacctgaagaatatactgttgtttataagacaggtttactagcattgacaactattataatagcaaaatgtaatatatctccgaacttatcagagaatagagatgggcaaatacataatatcagagagaatacattaggtttgggctatttaagatgggcaaataaaggttgtatatctgtgcgattcagagttggtggggtaggaatagatcttttcaatcattataagaatcaatcaatatcaaacacaccaaaacctagaattgatagtgggtacaaatttaatgaattggatgaaactgttggtaaacttcctggtgtggagattcaaatattgaatgtgcatttggtacatggtgaaaatgctactcaagtgcaacaaagatgggattcatgggccaaaattgagagaaaaataggtttagatgatcgatctgtcagtttagcttttgacccatcatcaattcaaagcaaagattcagcacaagtgagattggagcaaaaactgcatgcttctttgaatgtcaaatctaatgttgattattctaactatgattcatattttgatcaaggtatggctcatttaagtttaaataacgatcttccaaggacttcagaagcaccttttgtattgacagatatagagaaaacaaaatgtgaagggaagtttacaccaatagatattaacaaattcaaatatgttaccgaggctaataaagcaatagtagtatgtggggatacaaactatagattttcacttccaacttcatctcaatctagtgttcaacaacttattgcgtataattcatggaacgatttacttcaacatgatcaattgaaacaagaaatgagaaataaaaaagttttcataggattcagtgaacctgaaattaattttgctcctactttcaaaataatcaacaattctaatggtaaatgggtcaaaatagatactagcaaatcacaaaataacgagaacaaaaatacaaataatgaagaattattctatttaccaagatatgatactaaaagattaccggcatacacggatagaatcttgcatgttgaaaagccgtactttgaaaatgtcaaagattcatactcatccattactactaaaggttctgatcacttgccagttgcctcatcttattttatagatgcaccaatagttgatgaggataaacttcatctgctaagaagcaagtttaacaaagcatgggatgaaatcattaataaattggtatttctagatatttatgagataattgaagttaatcattcaatgaagagccgtgctattaatgacactccaactgcaccagttactcaaaatataaatatgagaggtgggagtttgaaactctcatgcattgttggtgagacattgaacttaacatgtcaaattgaaaatattacagatgaggctttcaattttatagttagggaacagacgaatcgtggttggtttggtaccaaaatattggtcaactgcaaatcaaagaggtattatcaagaaagaactggatctgaaatgcaacttcaatctaagtctaaaggtgagattgttttctctttaacgccgacatcggtaggagttttagagagaacattttctattgaaatacccgattataaagtttgtccggcttatattcgatatattgctttatctatacgtgttgaagatatatttggaacaagctttgaatcaatcaatgaaaaacaatttgaaaatattttaagctgtttcaaatttattatggaaaattcatccaactttttactagcaacaattgaggatacagttaatacagataatctaacctcaattggttgggatttagtaagagaggtatctctttgggaatttgataaagctaaatatgaaaaacttaatatcagtggtgaaaacttgttaagaacaaacataggctcaattaatgtcatggcatttttatttttatggttgaaaagccaaagctcagcttttaatacaacaactaaaagaggaaaagttattttttcaaatgttttgaatttaatcaaatatcttaaactagatgtatcttcagcatatgacgtgtttgggtggctgtttactgatgagtatgaactgcacagttatttcgacaaagattttgatataaagctagagttataaaacctaatttatttttatataactgtttatttacatgaactatcatgttaccataacatcaagtaatctattacattcaaatatatcaccacttgatacatctaacaatttaaaatcgtaaatattgaaaactccacgctctatacttaacaattctagttcacactcgtaaagattaccatattctaaactaactctcaaattatttgtcaaactcaccaatccagctctattaaatttatagtaaaagcttctgataagatggttgttggcaaataacggaactgcatcaagtttattaccggactgtataggaattggtggtatcgttttttcatattcctttttaattgaactttgtacatacagtattaaatccatcttgttgctggatttatttagcagctgaattttccatttaaaagtttcacctaacttaaccctagtaggacctgtaacagtaactactaatccacgttgaaaagtttgagatgtcgtttcactccacaattgactaagagaaatgttagaacctgattttaacttcacacttgtatatcgtttacctcctaaaacactattacctggaattttcgtatttgctgtgacggatgctgttgaagaggagcggtttggtgggggcagttttggggtatttttactatgaattaagttgctgtatgtacgcagtttcgataactttgcagctggtagtagaccattcttttttaggcttaaagagcttgaattgttattactgactaatgagcctttattaaataaatctaagtttgacgaccatgttgttttcacttttgtatgattgtcaactatggattcaatttcaacttgcaatggtttggttaaagatccatcggcaaatagaatgtaataaacaattgttaaatgtgagttaccatttagtacaactgggaaatctatgttattgcatggtgtgatatcacaattgactgaagttatgtttattttggttatttctatacttgattttgaatcaattgcaacttttgaagcacctaaatcaagccatgctagtattttctctgatttatatgattttagtgacattttgaataatgaagaaatatgtaacttcggtactgtgtgtataggcaatcaaagagttttcattatcattatcgtcattattcaattgagtttcactcaagcagctattgctaactaactcaatcccatccaattgaattaaattgacctcttcaaaaggtttgagattgttgtttatctttactgtattttcaaatttgtagtttgcacctactacaatggttgaaaaatttctactaggtactactctaaagctatgtttccatattatgatattttcctcttttaagtatggtgtgtccaaaatttcaactgaattcattgactccagtgacttttagaaggttcatgcatgtgtgatttttcatctttatactttatttcaaaagtaagttttccttttgttgtttgctcagatcttagtacgatatagacaggtacaatctcatcaaagtagccaattgctttccttctttggttttccagttgctgcaatattgtttctgcagatggttcctcagattgttttgggattgtttcactattattcctgatcatgaaatacagaaatgttttcaaataagtcatattccggtatgtacactcgtattgactccatttcttacctcacaatgcaaccaattaattcttttatcaacctcttcaaggtcagatcattattcagtttcaaatcacaaatttccaatgtcaaattttccgttgaaagtgttaatccagccaagattcgcgcactatattttttttctcttctcagcctcatctatataacgataatgttaagattaggtaatatgaattcagtttttcgtcgaaattgaggaaacaactcgctacatggaaatcttggaattgacaaaagttgcgattcgcaattcatcggtaatgagtattctgtgagaattgtattagtgttcacgcttctttttattccatatgctccacggactttatgtgaaacatgactacactgcagcatgtatgacaaatgtactttttatgccggatcgagtgattatatttctgttgattattaatccgaatgcttcgataaacgttccagatcaacgaatttgtattgaagcagaaaacgacgaccgttaggtcaggtatgaattgcgggaataactggtagacaagcggatatatgcggaattagaaaaagaatagaaatgcaagtaaggaatgaaactcctgaagaaattgtgtataaatataccatgatccgccatgttgttgacacagctggtgaagagctttgttgagaagtcccttatagaacatcgaaagataatcatatctcagagatacttacactaataatccactaagggaatccaaaggctaaggttatttaatttactttatattatattcatattatttataagcgactaattaatttaattttattcactcaaatcttattagataagtagtaatactccaccacttagcaattctttatttaaacaattaaaataaataattatatacagtctctttagatgaatgagactaactagtaatattcagtaaccaaatgtatgttggtttagtccgctgtaactttatttatagccaccggcgatgattctttagttcccagtaaacttcccccgcgcttaataaaaatactggggattcaaaatttttacgggtagttgaaaatgaagttacaacggacttaactaagatacattcgatttttacatattactagttagtctcatttgattaaaaaggctgtatgtacaaaaaagttaaaataaaatgaaattataaatagatgaaaatagcaaagatattatgagcaaattaattgataaatattataagcaatcaaaagaaatcaattccagaatttttatttcttccataaagtgacaaaagagctgataatttattatcgttgttggtgtgccatctgagggctgggtttcttaatgttttaattaatgcaccacgtaaagcaagtttgtaactagaattgcagctaacacctaatatagtagtttttgatccattgaatgctgaaacagtaacattaaatacaacttctccgttttcatcaacttgagaatctgaatgagtttttaaacggttgatgtcattaagttcataaaatatttcctgaatctttgaactgtaattccagatggctttttgtctttctgtggagatatattgattaatatacaataaaatccattttttcaaatccctacatctgtatggatctaaacggttagaggaaatgtatcttccaattacatattcacattgattgttaccattgtcagtatcgtcaagtaaacagaggtattttggtagatgtagaagtaatttttttttaaaattactttggtaaatattacttctcaaatgagttagctggttttcatttaatgagggattagattcataaaccaaaaatgaaaccaaaaatttgatggtagctttaccaatggatatcatgtttctattataaatttttgttctactctttcccataatagcttctggcactcttttgagatgtaatatatttgcgcttgtaattttgtactccagaatgttaaatctggaacgttttcttcgaattctactacataataaatcatgcatccaatgcgttgcatttatccactggttaacatttatttcactatctaagcaaaatatactcaagcacagtgctccaacataagattcaaatatatcagcatttatttttgagttttcatcaatttcagtattagttagcacagaattttgaaacaagtaaaaattagaccaagtgcataaattgtcattagacaatacataattccttatcacgttgatacataaatctggatattttttttctaatattattgtaacaatgaacttctaggaatgcatctcctaggaactctagtcgttcatagtttttcccagttgtaccatcgtaggaggaatgtgtcaacgattgagtttttagcagtggatcgctcaagtgtggaagtttgggtagtagaagtgtattcattgtgcatttattcactcggtggaaatattgataataactattaaatattcaatgttaagaaaatggaaatagataattgagccattgtgtcattagaggttttaaattaattcatgtagctgagccataaacagaaaataaattttatttattacgtaataacttattgcaaggccccattttctggtatgtaatcgatgagttaaaagcttatcatgttataatcaatgataagtccatcatattgccaatcaatcaaaaaatgtgaagttagtactgaattttatttacctttcatttttctcctgtgtagctttttttccgaaaacaaaaaggtcggatcaatcaagcgtgtatttttacttttgataatatctttctcctttctcttttgcatgtaactagtatacagagcattaacaagagattcgcactctaaccatccaattttgaacatgcggtgattatatttgttaatcgataatggtaaatatgttgaaacgagaaatccaagatattgctttaaatatgatgatttgaactggaaactgatatcttgttttctttttttattaaacagactataaaattgagaaaagtcaggcgtttccagcattttcaatgcttggtttgttaccacatcttcttttagtccattgtccctcatttgagctatttttttaacatcatatgtggtcatgttattgatgaatacttttgtaaacaaaaatctaagtgctgaagtacctaaaaactgtagtctttcaatttcaattgtcttttcaaaatcattggaatcagcattgaaaagtgattctaaatcatgacgagaattattcttcacttgcattatgtaacgatctgtatcacttattactcttgaacgggtattctctctcaaatcgtaagatttaaggttctctgtacaagcaatttcaaaaaaatatgtgcttaatttccaactatcccataaactgtctctgaaacttttgtaatgagtacagataccactttctaaagcaacgacaccaaaatatgcttcaaatatatcagcgtatttcttagaaccaattggaaatgcactatcaaattgtgatcaattgatgatccaaacacattttacccaaattcttatttgatgttatatcacatgctagatcaactaggtgtcttttggtcaaacttggatatttatcatataaaaatactgatacaatgaagtcaacataagcatctcctaaaaattcaaattttttaaaatttattgtatctttcatgttttgaacaatacttaaattgttcttgttttttatttgtggtaaagtgatggaagtatactcattattaagtgagcttgatttgattttgaccttttcagacattatcaagtaatctacttcattattttcataatctctccatctactgtatcgtcttgtagtaaatttgtgatcgaaccacaatctaacatttcgtagatacatgcagtgaatcgctttgaaaatcacaagtaacttaactcatgttgcttgttttttatccgttaaataaatcaattttactgaaaattaaaaaaatatctttagcttattacgtaatagctattatatatatatagtagatctacatgaatcttgatatatacgcttactagtgttaatgttctgctcttgatggatcttcactatggagtatttgggtatttgcctggatatataattgtctgttattttcctgtgatagtgatcgtttagcaaagatatttttcccttttgaaatttttttatagttccattactaatatttttgaggtttaatgttactaggtcgttatcttaatttgttactttttacatcattaattttctcaatttcattttccttatcatgtcctatactaattgagtccattatttgatttttttcttttgatgtgtagaaagaaaaagagtttgaatgtttattcttccttttggtctcttggttaactttattatacatatttcccaaagattcaaatgagtgttctggctttaatatgatactcttgcctcttttagacctgtttttcaacttcattccagttaggtttgttctgctttgaaatgtctcattgttatcttcagatgaattcaattttttcacttaatgttatactttcgcttcttcttctcagctcgtcgtggttatagcctggttgagtattcataagtcttacttgagatgaagaaatatttttccttggagatgaattacatgatgatgacagtgccttgaatatctttaactgagctgttttattgatatttgttttgaaaacaacccttgatttaagaatgcttatatatttgtccatggcacattctactgcatattgatccttaattaatgagattctcttccacgtggaccttgcacctttcaatatgcatttccagataaattttggtgttgggtttactagtgttttagattgttctccaaatcttagctcaggcaaaattgttatgtcaccaatataggattgtagcatcagttgtttcaattttgttgcaacattactcaatattcctaattctgtgaatacctcacaataatgtgaaatttccaaggataaaatgcttgacatatcatataacaattttttaaaactccaaaaattcccactgtctactaattctttacaatcagcagatagtttgaccaaaggtgatatgtgaggatttacttgacaagcaattgtatgattaacattaaacatctccgaaagtctagaaattggtaaatctgaattcaaagacccatcaacgaatttcaatgaagaatttgaccactcaactatttctcccgtttcagtatttttttcatagatagcagaagatgcaaaaacaatcggaagagagcaacttgcacaaacagctgaccaaatcaaaacattgggtgatgttaaataattaagcaatgtaggttgatcatgaacagttgctggagatacggttatattaagaattctacccgttttattgaatgcttctttgaaagtaatacttccaagaaaatctttcatagtttgttgtaagttttttccatcaaaccagactccatatttcaataatcttgataaatgagtataaaaggtatcggtatcattttctatatcaaacacttcaaacgtatggtcaaataaaccatctaaaatttctttgatttcatcacttctttttgaacacattacggaactaacaatggaaccacaacttgagcctgatacaatctttggaaatagattcatttcaagtaatgttgaaaaaactccaattccaactaatccaaatgttcctccgccactcatagttatagccgctctaccgtagcttctttttgattcctgtagtatttccataatataagtgtcatccaaggggcacttttcagaagttaaaagttctaaacattgaacacattcctcgatatattcagtaataagggttttggttccaatatggcattttgagtataacttgtgattattaattccggcaaaatcacgtttccagcatgttctaatgatatacaacaaattctcgtaatcatcattctctctgcatcttctcatctcacttaactgtttttcaacagcttcgtaatcgtaaagatctgactcttttatatctttccaaagattattattttccatttcatctaattttaaacttatctccaaccattcgtcatatgtaattgccattgattgaagtcttcgtagtttttttatttctaatagtaaaggatcatccttaggccatccaaagagattttttatccatgatgacaatcctgggtcgttatcttccgatatattaatattatctgtttcacgacaacaattatcatcaacaggtaaatgaacattaattcctaccctttcagcattacctaaaagaagttttgctgtgatgttttcaaatggattgttgtgcaagtatgtcaggtcataatctgtgaccttttcatccatgatcttgccaaaagaagtgtctcataaaaagtgcaaactatcacaggactgaaagttaacatatatatttttgaaccagcccccgcaaaaatcaaaaattccccaaggagaatttctttgttggagataacagaatttcatggtgaactaactgagatagcaataaataattatattattatctagtttaaatgtaataaatagtggtagttgtaaggctacatgtacacaaaataattttttctaatttttatttaagagaaggtcaatctttgtttcaagtgcttgtaatctctcatctttggcttgattagcaagtactaatttttcaatattagattcaagagtttctactaagttttgtaatttttctaagtttgctttcaaaccaccagcagctgcaccgggtttagcagcagatgaaggttcagatttaggtgtctcaactgtagaggtttcgatttttggagattcagctttagaagtttcgacctttggtgtttcagctttaggtgtttcaatctcaggggaagcagccttaggggtttcaaccttgaaagattcagattttgaagcaccactggatgatggttttgagttccattcatcattatcatcgtcaacatcttgggtatcatcgtcagaaagatcgtttactttactcagtaaactgttgactttttcttcatgtaacattttgtcaacaccttgttcttgagtcttggtgaaaactggtcttgcttcagtaactggttcttccttcgtgatttcctttttagtttccgcttttttaacttcttgggtagtttctggtttctttgcttctggtgcagatacttcagcgggtttggattctgataatgaagggcttttgacaccatcataaatatctctcatagaacataatattggaccattgactgttttaccaccaaaatattcatttgctgacattgcaggttttcctgctggagcgtctgggtagatatcatcttggaacatttctgatcttctaggaacaataaaagataatggttcaatagagttatcgttcaataatttatacgctttaacaatttcattatctttaatgttaacgaacctctttggtgagacagcaaaaccacgttgagctccagttgatgggtattcacctaaaagaattaaatcatcatcggcatattcaaaaaatctaacattaccgtcacctttaccagcaataaataacatattggtagagtcgtcatagaaaggcattaaggtaccagaagatgaatcaattgagataaatccacctaccaagagcacctttagcaatatcgtcagaagtcccataaacctaattgtctttcagaaaatctatcaaaaccagtggtaggctaatctattggtgttacctaaccaagtgattcttgatgatttagcacccaaatgaccttgaccttcggttaataattcaccagatctgacatcccaaactctgatttttttatctctggaagtagttgcaatctttgtaccattataattaaatgcgaaagaggtaattagatctttatgttgtaatgtaatcttacaagttttagtagataaatcccaaattttaactgaataatcgaatgatgaggatgccaatacatctttagcaacaggattgaattgtaaatgaccaactttacgagaatgaccaactagagatcctaatggttgaacatcaattatgttttctgggtcaacattgacgtatgaatatttttctggtatttcccagataagaatcttaccatcttcacctgaagagacaattctatggtcatcgaatggatcaaaagcggtatctagaacagaaccaccattgtgacctctgaacattgggaccttatcaggtgcttttccaacttcatcaactggaataacggtgaatgaaccaattccattggagtttaatgctatatataaaccatttgcttgaatgatattactatcaaaagctgataatgtaggctttaagttttcgtaacatagttctttcttggttggttgaccaaacacgtgtctaaacttggatgggcggacaaatttactcataattgcgatgaataaagaacaaacagcaaagaggttaagattttgtttgtttgttatcttgagaccatttgttaatatataattaaatgtccaagtctaagacgtcgataccatacaaaaccctcagaacgcgattccttttacaaaataaaattattttttggttacatgttttttagaggtgaattgtacaaattgccacactgaaaacttttaaccatcgagtttatatctcataaggttactcttaaataagaaagtaaaccaataaatattaattaatatccatggaaacgccgaagaacgaggtgtggaaactggccggatcaatagctgatcgaatttcccaaacatacacggaaaatgatccaggtttacaagaatcagttgttgaagaatgtatgcagttttacctatccatttcaagtgatgatacaactaaatcacacatgttttgtaaatcacaaacatcttcaactgttatctcctttttaattgtagttttagccggttttgatgttgattttgacaacgaacaatttattcctatccgtacgtgtatagatcattgtactgattgcttaattcagtatcatataaacagagcaaaaataaggaaaaattttatattgttgaaaaaagttccttatagcagtattcaacttacaatggaaaaaccatcagtctgggaaggtaaacatttatacaagaaagtatctaagtcaattgaagataaattggataatgaatcattgaaaatagtactgtcaaaaattttagcagaatgtttattaaatcctaaaatactaagactgaatcacaatttgaaaacatattttgaccattgtacaactttcttaaattcagctcataatttactacacgaaagaaatatggattactatccaggtttggtttacttactgttttcagagaatccagatcaaagaaattgggctctatcaaaattaccatatggaaaaactagatgataatggtaaaccaataacagatttcatgaataataatgactttaatgatttgctagttgaagaatacgaaatacatttctttaatattcagaaacctgatttcttctcagatgataatgcaatcaagttttggactaatatagttcctttggtaagatttaattcaattgatatgataaaatcagtggtatgtgaaccatactcctctgcttcatttagggatgattccaaaataagaattgttcccctttattcaatatttatcaatcatgtcttctcatatttggactcacctttaccatttctacttagatttcttgctatatcactagaaagactcaaaacctatatatttgaacttataaaaccacacaactatatgagcttttttgatatggcatttaacaatcctgcttataaaaaatatcttatacagttagctccagatgttttccctgattctttatctgaattggattctgcaagaacagctttctttgttgatttggtaaaatggatggaagtctgttctcaaatattgaatgattctaataactgtcagttttcgattgctatatttggatttttaactgattatatgaaaaatcctaattgtggtaaatttattggtacatatgttatggagaatatgaatactcaattgactttgaagaataatatttacagtgaaaatatatttactgagatgacatataaacatagtgcaagaatgttggttgataaaaagtgtattttgttgtttgatgcattaaatatcccagcattggaaaaacgtgcaattaaattaattaaaacaagtttggaatacgatatacaatcctacgcttactattcacataagttaaacaactaatcaattgcttactgtcccagattttcatccagatctatggaacctaataaatgtgaaaatagcctcaaataagaatttgtcaatgaattttttcaaatcttttgaagatataattaatgtttttttgattgatgttccatataaaaagacaaaactatcaatagacaaagtatcagaggaaactattaaaaaaactgtccttgttgcaaatagacataataaaactgtgcaaaattttacatcttcaattgaaaatatcttggtaaaattatctgaatatctgacctctactcaaatgaaattaattttggcagatgaggaagcttcgttcggtttttggtcactaatcatgtctccagtcgataaaatatacgattcatcgattgctttgatgaatgaatcttttgatgttgatgatagattagaagcgttcaaagaatgtttgaacttaaatttgaaaacaactttgacttccttcaaacacgcattatctaaatttactctattgcaactgtttcttccatcccaaagaattgttaaagtgttgatggatttcatgacaacattatttgatccgatgagtggtaaattaatttctctgaataatgaagtttctgtggaactgaaaacatcaattattgagttttggtccgacgtttggtcatttttgggaatgatttttaaaaacatttttaattggtctataacttatgaaaaattgaaacttacactaccaaaggatatatctgagaaaatctcttcagatttgttgaatttcactagagatgtattagatctttcccattcagttttgaatggtttgaaaattattattgctttgttaaattttgaaaatagttacaaatcaaaagaactattaataattaaagaaactttattaaatcctattattgcaactttgactgatttatttaaatggttaagattaagtgatgctgctttattgattttatgtgttgacctaataaccaaaatattagatttatctacagaagctggtattgtatttaaagacgataatctaacaatcttgattaaattatgtttaagagctaagaaattcaataataaaatgaatagtgagcaaactggtgaattactattacgtgcaagaaaaatgaatgataaattggttgacaccattacaattcaagttgaggatgaaaaaatggcaaataaaagatcaatgtctcctgatgttaaaactggtggttacgaatatacatctaggaagttggcatcacaatcaacattaggaaactatctgaaaccaaacattagagaagttccatcatttgtccctcctaagagattatccaagttagagctagcacagcaaaaattaaatgaaaaaagaaaattacaatcaacttctgcctctgttgaaccagcacctgcaagaccttcaggttacaataattctaaaaaacctattaaaattggttctgatagtgaatctgataatgaagattcagataatgaaaatactcaaactggtggattattcacaaaggagcaagttgtggctaaaatgaagaaaacaaaagctgcattacaatcactacaagctccgaggtttcatactgatataggtggtaaaaatgaaagaactgaaaaacagaatgctttattgaaaaagaagcaagctgaagagttgatgagattgagattgaatgttgatatgaatccattatataagacaattttaacttggtcttataacaatgaaagtgaattaccttctgattatgatgagtctaaatattttccaattaaaaataagtttgattcagtttcagactatcagaaaagttttgaaccattattattattagagtgttggcaatctattcaaagggctaaacaaattggagatgaacaacctttccgaatgactattggttcaagatctgctacagatatgttctttgatatttatgtttcagttaaaaaagaagttatcaatactgcgcgttgctttaatgacaatgatttattggttattatgttagtagataatctaccttccgaggaagaaaatgtaggtattccaaaaagattgattaaaaatgcaacgatcaactgttttgctaaagtccgtgaaattaaaaaacacaaatggtccgttttgtgatatcactttaagagtttcatctgaaaataataacttagtacataaaattacatcaggtatgacattggtcggtttgaaagttaatacaatgacaacattagagagagagttttcttcattggaaggtttgaaatattatgatctaagtacggaaattataaaggctgtgccagcagaaatcgaagagcctgattctaataaaattaggaaaattaaaaatgtttatgatgttaatgattcacaagctagggcaatatctggtacagttcaaggaagtggattttcgttaattcaagggcctcctggtacaggtaaaacaaaaactattttaggtgttattgggtactttttaacacaagaagataaaactgttcatcgtgtgttggcacctggtgttaaagatgatggttcaagatctactaatttgagttctctaaagggtgatataaataataaaagaaaaatcttgatttgtgcaccatctaatgcagccgttgatgagttggttttaagaattagaaaaggtatcaaaaactctaaaggtgaattttttaagcctgctgttgttagattgggcaagtctgatgctatcaatgaacaagttaaagatctgactttagaagagcaagttgataaacaattgaccaagatgagcaataataatgatgattctaaaattagagaagaacataagaagtgcattatcgagcgtgatgaattgagaaaacaattggaaagtggtaaattacctgaagaggaaataggtaaaactgaagtcagattacaagaagttatggttagaagaagagagttaggtaaaagattagatgaaatgagagaacaaagagcagtcaactaccgtaatagagaaattgaacgaagaaatattcaattcaaaattttgaataatgcacaagttgtttgttctacactttcaggttctgctcatgatgttttggcaggtatgtctatgacttttgaaactgttgttattgatgaagctgcgcaatgtatcgaattgagtgccattattccattaagatatggatgtaagaaatgtattatggttggtgatccaaatcaattacctcctactgttttatctcaaaaggcagcatcttttaattatgaacagtcattatttgttagaatgcaaaataactacaaagattcggtgtacttattagatgttcaatatcgtatgcatcctgatatttctagatttccatcaaaggagttttataaatcaagattaaaggatggtcctgacatggctactaaaacagctagggaatggcatgtacaacctatttatagtccatacagattttttaatttgagaggtgaacaggttagaaatgaaagaactcaatcattgtttaataaagtggagtgtagagttattttggagattgttgaagatttgtattttaaattcccaaatgttaactggctcaataaaattggggttatttccccatataaggaacaagttagacttttaagaaaaacatttattgacagatttggtaatttaattttgaaacaagttgattttaataccgttgatggtttccaaggtcaagaaaaagatattatcattttttcatgtgttagagctgaaactaatgcaggtgttggtttcttagcagatattagaagaatgaatgttgcattaactagggctagatcttctttatgggttgttgggtctgttgatgcattagtgtcaaataaaacttggagagatttgtgtcaggacgctaaagatagacaattgattaccgaaacttatgttggatttacaagaaaggtgacgaaggttatcagtgataaagatgccctgaaaactgttgatgagaagaaagatagaagaggcaaaattgagaaccttgatagtattgacagtagtgaaaagaaggataagaagaaaaagaaagaatccactaaatctggtatcattactcaaagtagtgatgataaacaaagtataaaatacctcaactcagcaccacttggtaattcaaagaaaaggcaagctactggaattgaacatattgatgtcagtaaattaagaaaaatatcaaaacatgttcaaaatgttagaccaattcctgttaaaactagtagtggacaaatttcagctgatctgagaatgacgaaaagttccaaaataacaccatcggcatccggagtaattatgcctaaaaagaatattaaagataatacacctgcaggtatggttaaaattagtaaaccgaaaccatcttatatgttacctaaggcacccaaaagagattaaatagcagtttaaaattaaattttatagaaaagaatatattaatatacagcagtattgtagaatgaactgaaggaattaatcagttttattgccttttgaagttttgatttcactaagcaacaaatcatatttatttgtgtcaggtttaaacttcagatttttctttattgaagattttggaataacaactgcattggtgtttgtaatacctggtggggatgttgatatacggttttgtatttgaagtgattgttttgttgcattgactaattgtatgttttcgttagagctttcgtaatgattatcactattatcattatatatattgggttctgttttttcaaataaatcttctgtctcatcgggttgtatctctatattcagtagtttcatggctttttctattgcatctagttcattcaaaatcagtgtttgaattggtgataaattaaatgatctagcatcttttattgaatctttcaaataaattctactggtaatcaatgttttctctagttggggtatattattttccaaaagaaaagtctggattgtagattcaatattctctaaagtcgtaaatatattagaaaggtataatgaagagtttttaaaattatccattgaatttaagttaatctttataagattatcaaaaaagtccaaccgttgctttaacttactagaaacttccaaatctgtcaaatttggtgaatcaatctgctgagttttaaacatcaaattgatctcttctttctccattattgataaagattctaattcgtcattcgtactattgagttttatatcaagtaatgatttagtttccaacaattgaacatttagtaatttcttctttttcttaagaattttcaactgagcttctaaattgaaaatttcattgtcaagtttaattaagttctcctctagggatgtgtacatttttccttcttttgaattcaaagtaatctgggaaattttatcgttcaatttggatttatcatttatccaatttctaaattgttgatatttatttaaactaaaatatttttcacttgagtataattcattgattgctgtaaagttctcgttcatttcagatattaggtttaaaatttcatttcttgtttgtgaaagttttggatctcctgattgtaaatattggccatgtaatttcactaattgaggtaaacgatcatatagaagtatttgttgttgtctctgcaagaaaattattggctctgcatgtgctggtgatagtgatgtgttttcaatatgactaattttctcctgattaaaaagatccattattgatgaaactgtaggccaacctttgcctgattttgacaattcgtcatttgaatctatccctgcctccaaaagagacaatttactaaactgatctgtctatatatgttagtatctcttgctgaattatgtatataactccaaggtgcaacagtacataccagaattcgacatttgataaaagaggacttatggggcattgataagaaaacttgtaacataatgatttccttttaggtaacatgtaaattattctgtaaattttttacctgattttatattaatacgtagaagagaatcaatgatatacaaaggatagtacatgatataaaagcgttgtctatatcttatctgtaagagtaagtttctgtgtaatatctgaagatgactcaataatctttttaaattctgcaaaagataactttccatcaccatctgcatcaccttccataatagttctatctacaagttgttgtaactgcacatctgtaagtgaatcggcaaccattaatcgaagtacaataaaaagttcaccattagaaatataaccatcgccatcaatatcatagactttgaaaaggaaatgtagtttatcatcgactgatcctgatgatgaaaagactgaaagtccggcaacaaactctttgaaatcaacatcaccacctttatcttcatcaaatatatccatcacacgtctcgctagtgggttttgagagatacctggaatagccaagaattcgtccttgtcaatagcaccagaattgtctgtatcaagtttcatgaaacgttttgcaagtctgtcaatttcatcggaaccaaaactagttccttcagatagatcttctagtagactagatggaatgttacccattgttgttgtggttgttgtggttgttatcagaagacttgaacagaacgtcagaagatgataggttgagagaaatacgaaatggattacataatactatcttcaaaggtaacgttattattactactaaacatcatgtgatgttcatgttttaaagataatacagctatttttgatgaatcgtataaatacgataatgataatgatgatatacacatcatttctataaaactacactccggaatatcctcttgcaatacctgtacgaccttcttcaacgagagcaccctctgtagaatcttcattagtaaaatcacttccaagtccggtccattcacgagattgaagattcattgcagacatcgatacggtattacccattgaaagagttcctgagaatctttgcactaaagcattttcatctcctttattggatgaagaggattcactctctaactcaagttcaagatgtcttaattgacgaagtggttggttcatctttaatttacctgtaactggatcaaattctggtgcataatcgtcctcaactttcttcttcgtcagtcttttcagtaattaaattctcttctgatttttcagattcattagttttttcatttcttaataatgattcaaaatctgtaacccattttcctgtccatgtaacttgtggtcttagtgctaattcaagttcatatggtgtgattatcggtttataataatccccgtacatatcaacaacgattcctgattgtccacatccaataatacaccatgcatcaacaacatcaaaattagcaagtttggcaacgttaggtttaccaacaacaaacatataatgttttttacctgcttcaacaattgatttggttatttcatttaataatcctctagtatttgccaatgatagtgtgttcactaaaacacctatcgtacttgcagtacgtgcaacttgcatatttctataacgtttcattaatgtagggaattgatcatgtacaatttcaatatcatctgtatcaacaatctttaattcattgaatttagtacttagtagtaataaacgggcatcatgtggtctagaaaggtgaaactaatgagtattcttgtgtgagaccatcgtatttacaactttctatataattttcatcatcaaaatcaactgtctccaaatattcgtttatatcattgtcattaaatccagttagaattctatcagcagtattaattcctcccttacctgtttgttcaatttcatcaattattttacttttcaacccactctttgaataattgatatgagagacaattatattcttataaccttcttcttttaatatttcttttaattcaggtaacatataactatatggtgtacttgacatcaatacaactttttcatctttatcgatataagtattttgaaaagtttccttcaatttcataagatctatgtacggtttaccaaatacataacatgaattgattttatcaactggattaagacatgcatcaccaaaatgaacaacaatatctgctttaatatgttcagctgcaacttcatctatacaacatggagaatatgatgtatctgcaagtatccatacatcttgatgaaatttactcttatttttacattttgatccacaattacctccacatgtattactatcaattgtcttttctactgattcaatatctctattcatctttgcaggctgagtaaaatcaatttcttcattagatggctcttttacttcctttgcctcttctgaatcgtgaaattctttattaagtgtattaatgattcttgtaagattgatgctacaattgttgaatcacaaattaaatcatcagggaattgtaatgaaacagatgggaattttaaatctccagtttctgcattcctactattcaaatatttagtcaatttatctaaactgtagtattcacttataatatctctaacttcctctttggttatgttcttactattacaatattttggacctaaatagcgtctcttctcacgtaaagtttcatcggtataaccttgaactttagaaaatagttcctcctcatcttgtgcagttgataaaacgggcgctgataccgcttctgtttgttcactcattcttattaccaaatccacagatcagttttagaaaagaaagactatttaaacaaccaaactgaaaaaaaaaattaaaaaaatttcactgattcatgcttaactttgcaatctcagtaattggacatcaattttttttttttgatctctgtaatgttggtttatttgaaacttttgttaagttgaatgaaactggttttatctgcccttgttgtttctttgatgttaagaccacaaatattaaccagatttataccgaactccttcaaatccagttattcaacattaaaatcaaaaatgtcacaaatagaattaggttatactgcagattatcatgtccatcttagacaaggtgaaatgatggaattagttactccaaccgttagagaaggtggtgtctctatcgcatatattatgccaaatttaactcctccattaacagatattgaaagagctgttcaatacaagaatgatttacaaaaattggccccaaaaactacatttttattaactttctatctttcaaaactcttgactcctgaaattgttgctaaggcagctgatgaaggtgttatacgtggtattaaatgttacccagctggtgttactaccaactctcaagctggtgttgatccaaatgatttcactgctttctatccaattttcaaagtcatgcaagaaaaaggtttagtcttaaatttacatggtgaaaaaccttcagttcataatgaaagtggtgatgcaggtgaagatattcatgttcttaatgctgaaccaaaattcttacctgctttattcaaacttcataaacgattttcctgaattaaaaattgttcttgaacattgtacctccaaagctgcaattgatgcaatttatgaaattaacaaagatttaaaggaaggtgaggaaccaaaagttgttgcttcaatcactgcacatcatttatacttaacgattgatgattgggcaggtaatcctgtcaacttctgtaaaccagttgctaaattaccagaagatagacgttcattattaaatgctgctgtttcaggtaaaccattcttttttttcggttccgattctgctccacatgatttatcaaagaaatcaactcatattggtgtttgtgcaggtgtttacacccaacaatatgcaattgcttatgttgctgaaatatttgataagattggtaaaattgaaatgttaaaggactttgtttcaacttttggtaatgctttctacaacatggatgaatctaaattggtttgtaaagacaagtgtgttttagttaaacaagatgttgaaatacctgaaattatgacatttgatgcttcaaacttaaaaattgcacctttcagaccagttgagaaattatcttggtcaaccaagtgggtatagactgatataaaagatctatataatactttctgtatacaataaaaattaaattaacgctaaattaatttgtactaattaaatattacccaacaatatcatgaactttaggtttggatcttgtcctgttgcaaatgtaccatcttcattgaaaacacacatattgttactcttccaaccccagctttgagatttactaaaatcattaggtactgataaaaatgatgtgattgtaggtttagaacgacgtgatggtgtaaatattataaaataaacttttattgcagatctttcatcttcataatgcataattggattactattattattgtaacgtctatcttgatgtgcagatttatatttgtttggtgatttagatggtgagcgtgaacgcgtcctcaaagatgaaaggtttgatatatctaagtttggtgatgagtggcttaatctttgctgcggtgaattggtaattgatggagatgacatgtcatcagaaatagacagatctatcatattcatttccaggttatcaattgatgaatcaagttgggtgttagttctgttatatggtatagaagtagtggttgttgttgttgggaatgaagaaagtgaatcttttcttgggtatttttttggcattgatttatagttaatattgtccgcaaatacatcagaatttatcatgccagatttagattgagagtttgatataccgttatgagctctatgaaggtaaacaccaatttgataactattttttgatgtaatatgacttttttgcaaatacaaattccagtatgatcctgcataccaaaatgttttgccataaactcttttatcagttgacaattctgagacatttgcaaaagaaacagaaaatctaaacgggttaattttagtccaattatataaaacttcactggcttttttcatgttgagtaaattattattactatttgtcaaatcatcagcttgtgtagattttgcatcatcagcatttaattgattatgtaaagttttagagagactttgatccaataattcatcgagttcctttggtaatccagacaatgtctcatcttttgttggtactttgaaccatttagtattattagaaggaggttgaggactcaaaattaaagaatctaaatgtaacaaatcttgagatctagatacaagagtttcaagttgaactgtctgccataatgcactgtgtaatacttgaggttcaatgtatggattaccattaatgtcattcatctcttcgagttcttgtaattgaagtggtgaaatattacaatagtgaacctttgcattcaatactttctttatcggttcaacatcatcataaatgctagtgtttttttttgaggatttcaactgttcctgtcttctttcaatcaatttgattatgaaaatacatctatcccattcagtaggtacaaaaaagtaatcctctcctactacttcagatataacagtagtaggaattctatcccatttttcagggccattttcccaaccatttgaacacagtatacctttaccattttctataattctttgacttgcagatccgtaatttgatgtaattgcaaatctaagattttctgcaatgttattgatgtccatgttttttacaataaaatcagttgctgtgcatacaatttctgggatggctaaatattgaccgatttcaatcatattgtaagaaattttatattcctccaccaaattagcaactccgtataatctagagatagccaactcaaaactttttctctttgtatatatcatatcttcagtgttttcgtccatatcaaattgtaatctataaactttcctataatcactcttcaagtcttcctcttcatcttctgtttcatcatcggagtttaaaccattgatgttattgttcaacgtgctcttagaccatgagaataaagatttgaaataaggacttttgtcaagaaataacttatgtagcttatattttttaccaaaagcttcgataataacatcataatgttctcctttcaacagaccattgacaaaaagataattaccaatatatggtgtggtgcaacatccataagggcatgtagaattgttttggattggctcatcgtttatttctgtatttgaagataaatctctaatttctgattgtttcaagctaaaatttgtggtattcatttcggtggatgatggtgtgtggtgtagatttgagaaagaatgatgcatttgaagtacttggttattgaagagattttgattcaattggtgttggtgtaactgattttgcacatcagaatccaaagcagtaagagaaataggaggagctgaagaaggtcgcagttcagggttggacatttctaatgatgtgtctattcacaaacaattgtgactactcactttatagaaaggtgatgttaagaaatacatcacaagagttaaagaagttacgagcttttataattaggaatatatatcgcattactacgtaatttgttcctgaatgggctcaatcccaaaggtatagttactaattttatgtttgcaaactctataaactattatatacattactaacttcattcattcactttctaagaattatcatttaagaatctttgtgtatatttgtaagaaatagttgtaaaaagagaaaaacatttcacaattattcatcttgtccatctgagaaaacctccttgatcattgcagctaattcaagatctcttggagagtctttagagagtaatgcttcatcatcagtatcttcagtggcaaaaccgttaggatcttgcatccagaaaaaatgttttgcacctgaacttaagaaggcaaacatataaactcgtccactcttacatgaattgatctttttccatacaacatcaccttggaaaacaaaaagttcatctccttcaacattttggtctttacctcttggtctccaagtaaatgaataacatccttcaccttccggactgtgctcaatgataatctctcctggtgtctgagctggagtgcactcattcgtgtcttcatcgtatagcacttttccggcattaaattttaaaggcagtgtgacaggcattttattaatatgtgtatatgtgtggaaatgtagtggtagtaacttatgtctactaataaagacaatatgaattgtaatgttgcatggattcgatccagctctgcagcgttcaatataattttggtattcgcttactaaattttcatgtctgggtcccgttaagttagcaatttgataaagtgtctgtagatcatgtcttcttttaagggtatttttgatacagtttttcagcaattcacactatagagacaaataaataaaaatggagtttccacctaaagatgtacagttacttgtggcagaaatttcggacattttaatatcgagaaatcaaaccgtttccgtaagtgaaggtgcatgtggaggattattaagtgcttatttgatttcattgcctggtgcatctaaattttttgatggtggtcgattaatgtacagtttaaaatctagattgaaatcatctggttggaatttagaacaaataaaaagttatacaggtccgagtgaatcagttgcacttaaaatggcacgtaatatgcgaatagaattcaattctacctatgttttatccgaaacaggttatgcaggaccatcagccaatgtgaatggattagataatatgagtatatcggatgaagaggcaaaggttggtatggtttatttaggtatttccgggcccaatgggaattattcctgtgaaatgtccacagattcgagtgaaagatctaacaatatgcaattatttgctaagtttagtttacaatttttcctaaaaactttgaaacaagaaattcaaaatgaaagtgagaatgcaaatgtccagaacaatgtatagtgttatgtactgattaaaatgtaatggagcagaacttttattatgcgttgcggctacctatacggtttggtttcaaaaaaaattgagtgtaatattatttgttgtaaaatatacgaagtactattattttaaaaaaaaattttacaacttcaaaaatcaattaaaaataaactattttttaaaatttgcaaaatcacgtgacacaaaaatgttacgctagaaaaatgtgtaaatttttacttttaacaaatgctttggtggcccagctggttaaggcgtcagtctcataatctgaagatcgcgagttcgaatctcgcctagagcagagcattatttttttataatcagttggaatgtttattgggtttgactatgtccaactccattatgttgaatctactagattaattatctttatttttattaatccctacttataatatgttttttactgtctttaatattgttacacacacacacacacactacataatcatttcttcaatttccattccacaatcaatgcatctcttgatgaaaacattttcattgctatttccatccacatcttttggttttgcttgtggagcactccagtcatgaacatgctttttatctcttacatttcgtaaatttcttgttaattcctctgctcttaactttttcctcatctcttttaacttattattaaacttcttctcccgacgatttttcttcattccttctcttcctcaaccattcctcatctagcttttcagctgatccccattttttaaaagcatattcctctatttgatatcttaaaaacaactgcatcctagaaaatgttccactgtgaggattctctttaacaattcctcttgaataataaatgatcagctagttctggttctgtcagaaaataatcctctttacattcagttttggttaacaatgagtatttttcaggatacttttctttacaacttttacatacttgacaaccaaaatttttctccattttcttatcaatatcataagatccacaatcaaaacatttgggaccatttctaatatccattggtggtaaatcttcttcttcatcatcatcttttatcatcataagctttttttcttgttgttgattcttccaatcatttaatgtcattccaataggtttcccatttttatccaatttttgatttgacacaaaaccaccaaaagagtcttgcattgtagaaaaatcatattcaatataatcagattttcgaactgatggtctaatataagtggaaggtttagcttccctagtttcatttgatgaattaacagcaccaggaacagcgggtgtgtaattatttgatgcgtctctcatcgtccctgttagagctctttgcctttcttttattctatccaatgctttttgtctatttctatcaattaaagcctgttgctctgatgttaatattaatttaggtctttttggtggatttgattcacttgaattttgggtggtttgtggttgaatattcgtattatcaactccattttttatattctgctgtctttggcgtatccctttctaacgccttggcacgattttgttcctattaaataaaaccataatgtagatgttagtatattgtttccagaatttttttaataatatcatccacatacaatcatagccctttttgcagcatccatctttgaacagtgattccatgcacaaagaaggccttttaattagaggaaattaaaagattaagccaccagttaatgaatttaaatttgaaattaattttttgtatcacgacgatcagccctctagtagtaagtttgtggatatacatttaactgttttgacagatctcgattcattaataattaaaagtatttatattagaacttgttcttttctttcttttcccattattccatcacaacacatctttgctaataaatactatggataaacagtggctacaagggtcaccaacgaggaaatctggtacaaattcagctggtttgaattctgccatttttagttcgccatccactcctagaaagaataagaagaaaatggtttatagtgatcgatatataccgactagatctgggatagatctccaggcagcattcagtttggctaatacagactatatacatactacaaataatgccaatggtaattcaaatattgaaaatggcggtaatgtaaatgatcctgattatttaagagaattagaagctaatagaacgtttgaatcagtattaaagactgaattatttggtgataatgtgcccatgacatataataaatcaactcctaatatccatagaacggtgacaccgccgaataacaatgattttaacatgaatggtataagtaatagtataagtggacgaaatttaaactcaagcttacacaacatttcagatagtgaagatgaaagtgaatataatagtcccacgagagaagaattgcttttgagaacaccacagagaacaccacagcgtcaagcaggtaacctgtttacataccaatctccgagtaaaagtcgaccaaactcgtcgtctatgaatgtacagaatgaattatattcaatttcacctgtcagagcagatacacaaagtttattattatcgccaccaaaaaagactagaaatatacccaaaattcctgctagagttcttgatgcaccagatttagcagatgatttttatttgaatttagtagattggggatcacaagatattcttgcagttggtttaggatcatcagtatatctatgggatggtgcatctggtacagttaatcatctatgtgatcttgggactaatgatagtgtttgtagtgtgtcatggataggatcaggtacacatttagcgataggaactaactcaggtttagttgaaatttgggatactacaacatgtaaatgcacaagaactatgacaggtcattcaatgagagcttcatcattagcatggaatcaacatattttaacatctggatctagagatagaactattttacatagagatgtaagagaacctgctcattatatggaaaaacttgaggcccataaacaggaagtctgtggacttgaatggaatattgttgataacaaactagcatcaggtggtaatgataacaaattgtttgtttgggatggattaaacaaagaacctttacacaaatttacagaacatcaagctgcagtcaaagcaatatcatggtctcctcatcaaagaggtatattagcctcaggaggtggtacagttgacagaagaattaaaatttggaacacgatgacaggaagcaaagttcatgatattgatactggatcacaagtttgcaatttggcatggtccaaaaactcaaatgagcttgtgtcaactcatggatattcaagaaatcaaattgttgtttggaagtataataccatggaacaagttgcatcactcactggtcatacttacagagttttatatctttcaatgtcaccggatggtcaaactattgttacaggtgcaggtgatgaaaccttaaggttttggaatgtatttgagaaggctaaaaacgagccaaattcatcatcagttttacttgacgcttttacacaattacgttgaaatatctactcgatacaattaatagaatgattaatgtctatatctgtataatattagaatgtactacattatataaataaagtaccccttttacatgaattataaaaggtgctttaacactgatcgatgagtagctttttttcagtgaggcggcgttcttcaatgtttacctggaacttaatcaagaaaagaaagtgtccttttaaaaccaagtctatttatactcactatggagggtaatacaaggtttctaatgactcccatgatatctccatccaaaatacccatattggtgttgataaggggttattgccataaaaaaattccacaaagatgcattcccccagtcctttcgattttggttgagttaattgaaagtgatccagatcaaaaacctacattgtcaaaatcatttattacaaagaatactgatggcaccaatgaatccaatgatctcttaaaactatatttcccatcacttgatgaaatattgtcttctattaatgtttccgtacgatcgtttttcaaaacaaacgataccgttcaattaaattcaaccgaggaagatatagctctgatatcacaatatatacaaaacgatttatggagtttgaaatcatatgatgacttctatacatttttaatttcaacatcggcattaattgttgatccagcctttgaaacaaatttattaaacaacatacccctctcattactaccctcaagtgatttggtgaaaccattatactcttcaagtttcttaggaagttttgtttcggctttatcgattgtgattactacaatgtctttcgaggaaggaatacgaatatggaaaggatttttacaatatagagaggatagtaaatattcacatcctagtcattgtacgaaaaaagataatattttagaatattcatttgaaaacagcataataaagagcaactcattagacaaacaaaacactaaaaacatagtatattcacatatggatttgagtagtttatttcaatcacaagtcatcaagttacaaaagaattccattcctccatctgacgatttgataaatcttatgaaagcattaaatcagtccaataaaacactaatgccctctttatatcatgttgaatatttagatcattggaggaaaggtaactatgatcaaacatttgattcactacatagatattttgattatatgatgtcgagtcgtaaacaatatttttatcattatgcacttctggctttagcaactttacattcttcttttcgagcaaataaagacgcgttaagagcaatagatgaagctattttagttgctagagagaataaagatttagattgtttaaattatttattgacctggttacttaattttatgatttccaaacctcatttatttatcagatcagacaaacatccacctaggttagaaattctaaactttttgaagctaaaaactaaagaaatacaagatttatcacttcaagcggtatctctacaattcgaagtggtattatcgttattagaaggttcctgtttgaaatttatgatggaaaatttaattaaaaccttttatttgatcttaaattttaatgatatcactgaactgagaaatatttttgtcacagcttgtcaggtaagtgatactatttttaaaagaataggatatccaataatcggtgatatttatttagatatggctatatatcacgcaagaaaaaacaggagtgaatttgatattattgttctatacattcgaagatcagccaatttatttttttcaggacagatagaagaaagttttaatttgttgaactcagtggaggaaaagtcaaagaaaagcttttccgtaactgctaaatggaacatggcatatcacagtttaaagttttatgaacaacttaacaaatgtgaatattcacagtgtgaattattgttagagaaaatgcattcattatccgctaccatagatgatcaagagataactaacgaatatctatatcaaagggccctatattttataaagctatgcaatgttcaagattcttacaaaataattactaaacaaattgagtgtatgaaagagaacccaattgcttacaacaatttttggtttatcagatttcaagtattacaagcaaaaatgtatgtcacctgtactcaatacccagatagaggtctaacattactattaaacgctttaaggctttctcacaaaggttcgttaatgttcaattattgtgaatctgtgatttgcttgtgtgaacttttgttgaaatctgatccattgaactctacatcagatgtccagatattactgaacgaactattaccaaaagtgatagagatcaatcgaaatgatcttatttcagactcatacttgttaatggcaaaagctctgttcatggaaagtgagataaaggaacaaaagtcattgaagattcaaaatgatagtttcaaaatcctgaaatgtttaagaattgcatataaaggttacgaatcaatagaagatcacgaaaagatacatctttgcttaaaattagaaatgaaaattgccaaattcttcaatattccagaactagaatatgatcttgcgtctaaattaaatactcagggtcaatagagacaaattccatatgctacaaattccggagttagttcacataaaaaatatattatataaacttaaataataattaactcaaagttaccaatctataacactttgcagttcttcaattgcgatattagttttcttcacacttcgaactctgctataaaagacattacaatcttcattagagcaacactcagccatttcattagataccatttctccaacagcaacttgtacgcaattcttacagaaagagtagtatgaggatgttgtgttctcccatctctggacacgatttttgattgttaaaatgacttttagttcattctttttacaattagcacataatttaccatcaacagcagattccccacaacaaacacatatatcaactcgaagattactcaatttgatatttgtatttgtaagctttcttctttgaggtatctctctaacccatgatctaacatcaattcctattaagttaaatattctttccaacgggggtataataactttattaatgtaataatccgagtcaagtcgcatctctttcttaataaactccgacggagacacacatttgtccctaagaatttctttggagtttataggttgtctgacaagataaaagatacgttctttgtattgaggcgtcaccctatgatcatctactgttcttttcattgcaagtcttgcaccagcaggtatgtatttttcattcttataggtacccactctaacttctttcgcaaacatgaaatcttttatgttgactttgttatctataatcttcacaaattcagctattaagtaatctttcagcacactcatatctctagttccaaataaaatagttaatgatttttctaagattttttgttgagccggtataccatctcttctcacagtctcaatacctttcgcatcaaactttggttccagttgagattcatactcaaatgaccaaccaacatatcttttcttactaatcaaaacggatggtagatatactttttcaaatttcaatttaactggactcggattcaatgatgtaatatggtctgcaatttcccttcctaaccgaaatgcatcatcttttgtcttacctggcaaatacacaaataatgaatcagtatccccgtagacaacagttgcatcccatgtaggatttgcttcaataaccttaacagcatttaataatgtttcacgagcgcaggagacgattgcatcagcaatatcagaattaggcattctaccagaatatgttgcagaggtataaccataagtaacattggcaatcaacttcaaagccaactgtctattattgtacagctttcttaattccaaatcgtctttaaagtagttcatagtattcttaacataaattctagtatttaatatctctaataacattttagataataatgatttcctaatattttctttggcaaaaatcataccatttggggtgatggttatatcattttctaaatacttcaatattccttcagtagctttgtaagttgttacacccatttttgtatactgattaggattatagtttttgagccttccaagtaaagtagaataacatatattataagccataatcaaagaaggatataaggattgaaagtctaaaacaaccaacggcgatttgtaaaatgcactattgggctccataactaagggaatacactccaatgaatcttgtttaaagacttgtttttttgatggagatatcaacattaagttttctgcttttgccaatctaaccaataaactttcaaccttaaactgacttccacggtaaatgattgaatagaaatcaatgcccaataatctggactgttcattaattttttcaatgacttctagtttcattataagatccatttcgtaattgactctttttatatagtagtttaataaataaaaagtgtttcttctatttccattccacatattcgttaattttgtagattcaaaaaatggtaacctttcatggaaaatatgaaagacaacattttctaaactatagtgattgagatttagttcacttcttaatcttctccaaatatttagcatttgacgacctgttatctttattgaagaggcatgtgtatatccatatctgtcacccattttattgttttgtttggaaaaaactctggatagtttaagtaatagattcatttgatgttttatactggcacgctcaatgatatacccccaagaagatttatgcaattcccatccggataaaatatcaggatcaatatattctactaatgaaacaagcgcaattattaaatctaattcagaatcataacatgtaacggaaatcgatgattgattggccaatgacatgtatttgagtttatctttagagttcaccaacacacccatagatggtaagtgttcattatttacaaacttcgatttaaaggaccaaaatatggcttgaatatcatcaaattcaggatcaggcaataactcacctctcgtattcacatgaatctcaattattagcaaagataatggatttaaattttcagatgttttttcaataggtgtctgcaatgaagggtatttgaattctttgaatttctgtgtaggtcctttagtttgtgatctaaaaaaggaattatttggtttgctattgattttactcttaaattcatttttgcaccagtcatgaacatctttatatgagggagcagtaggcgtatatttccaaatataagaatctgtttgatctttatttagcaaattatattgtttaactgatgggtataatggcagatctgtttcagtgcatttgaaagtgaatttctctccagcaaaaataaatggcttcgagtcaaaatttgacaatcttgagtaaaagggatctggatattcaattttactcatattaaaattagagctaagactatccaggaaatcatttttagaatttgctagtggttgttgcagattgaaaacaaaaatggattcattattgactttattatcagtagagaaataaggaattcaatttgattttatcggacgagcttgctttacgccgagtaaaggaaatagttgtatttgaaatattgtttttaaaagaatttagtagtctggagttgtttactgatattgaatgatctcctaactcatctgtcattgatgcatttaatttttccgttagagattttgtatgattcattacaggtgaagtatctgcattttgatcttcaaaatcatcagaatcagattctgatgcttcataatcaacagggataattggccgtttgtttaacaaattatcattaattagtggtgcataatgctcactagtgtaagtttcttttaattgtaaagtttttagtgaagtgaaataatctgaacaatttagaaatttctttgacatcaaatatttatcatcaagctctattctatactgtaatacatcaatattttgaaaagcggttttaacgtttttgggtatatgaataagttttggtacatttgaaacgtcatattctttgaatttatttacataggaagattcagatgcttgtattgattttttcaacaatttcatcaaatcatcattatcactccacactaacggagtcttggatctagttatattatcatatagtcccatttgagaagaaaatcctgataacccccgggatccacgtaattgattgacgtcatctagcaacgattttgttgatgtaatataagttgtatcaggggaagagtggtaatcatttatttgatcaacatgcctttccgataattgatatctattatcaatccaaggggataaaatatctagttctaaaaatgacttactcattcttggaaaacatttcgattttaagacattgaccgacgatttgacggtatatatgtgtttgttaattaatttatgtaattcatcagttagttttagtttgttaaaataatctaagtttgtagagaagtaagtatcgttttgagtacttgaaagttgaacaatgggggatctccaaaaatgattggaaacattgactgtttttaaagtgtaaatgttgtagtcagataaaaattgcagtaaataaggaatatgaaattcatatggttgaataaacttattgaatactttagattccaaaagtaatctgttaagtctggatatatactttggagatgaaagactaatttttaaaaatgttgattgtccaatatgataaccgtaaattgaagtaccagctataacggaaaggtcagcaacaaaattcttctgatttgattcaaaatcattatcaaagtccatatcatcgagatcactagaggaatcatcaacatcattctcaatatcagaatcatctcctgttgtttctttctttgatcttttaggtttcttaacgtgttttctctttgatttgaaagatattgcaatttgattattgatttccaggaaccaactattcaactcttttttcatttcatccatggaccacaactttgcattcggtagaggaacatacaagtaaggaaatacattatgcacatgaaccatgactggagcattttcaactatagcataaagtcttattattgggactatttgtattttttgatgggacgtttcaattccattgaatgaaacaaacgttctgtctaaaggagtaggttctgattgataagagtcatacgagaccacttgtatttccatcatataggggaaatcattaccattatcaagaaagatttaagaaagagtaataacttatagtgtaaagtgaaataattattataggttaaatagagccatgatctcacactaactgcattggtagtttctttttcaataaattatagattgaaactgttacatacataaatccagctgactaacatcccaaatacaatgtctgtatcactgtctatgtctccagctcctcaacaacctgctcaaaaaaacgatatcgttcattggtctcgtattccttcagctgatggcgttccacaatggacttcttcatcagaatctaccaaatcatttgttgttacaccactacctacacatgttctcagcaagtgggcttatgataagtctccagcgtttgagaagccagaggcaccatctactcaaacagagacaggtctttcacatgaaaatgcccttgatgcattgtccgcaggtggcggtgatgataatggaaatgctaacactcttttcggttcaagtgctgctgcataatacaacaacctaacataaatacacacatcatctacactgaatgctgatatactggcattcttttgaaaatattcacttctaaatttcttgtatattatataaaaattgactaaaacttaatactgttgattaaactattgaacagttacaaccaaggaaaccagaactacaacatatctagtttcaaatgtaaatcttgtcctcatatgctacatataatattgtctaaaaaagtaacttgtaagaaagcaaagaatttgttagtgtctcgttatgaagagaaattatttcgtgtcaatgatttagttagtatattgcaactaggttcatcttttctcccgaacttccttgttttagcaaatgtccgccgaagatacattaccctgggtagagaaatatagaccacaatcattggatgatatatatggtcaaacagctgctgttggaaccataagaaaatttgcttcagagggtagaattcctcatctattgttctatggacctccaggtagtggtaaaacttctacaattattgcattagcaagggaattatatggcaagaattacagaaatatggtcttagaactaaatgccagtgatgatagaggaattgatgttgttagagaacaaatcaaaacatttgcaagtacaagacaaattttcacaacaggtttcaaattaattatattagatgaagcagatgcaatgacaaatgttgctcaaaatgcattaagacgtgttattgaaaagtttacaaagaatacaagattttgtataattgcaaattatgcaaacaaacttaaccctgcacttttatcacgttgtacacgttttagattttcaccattaactaatgatgctataaatggtatgattgatcatgtctgtaaatcagagaacttaaacattactaatgaggctaagatttcattgattaaattaagtggaggagatatgcgtaaggcattgaatgttttacaagcttgccatgcatcattagataacgcatcaactgaagaaattgatcaagatatgatatatgattgtattggagcaccaaaaccttcatctattgatacaatgttaaatgctataatgaaaaatgattggtctgatgcgtataatacccttattaaaataaggagaattgaaggtttagcattagttgatcttattacttcatttgtggaaatacttgataaatatactctcaaacctcaaacgaggcgtctcctctaccaaggtcttgcagatattgaatatgctatctctaagggtggtaatgacagtattcagtcaactgctgttattggttgtattaaaaacgctttagagtgcgagtctatgtaaaagctttgtagatttgtatcattaaattactgcttcagtgtctttctttaacagacaaatacaatatttatagatgcttacacagacagaattacaagagctggttaaacgacgtcgtgatgttcaagatttggaccttgaatggtacttaaaagttaaatccgatattttgaatcttttgttagaggtgaaaaataatctaaatgattacagtgatattttgactccaactcgaataaatgagttacgtgacaacttgaagttagctaaagctaaagtagagctctctcttaattatgatattgctaaatacactataacatcaaaagattcagaaaattatgaaactgacttacgtgaatttttaagtaaatgtctatccgaattaacttcagagtttgaaattgtaaataaaaaaatcaaatatgtcaaagatattttttataaaagaaacagcatcaataatacaattatggaatatttagagaaggccaaagtcatcaaacttacagaggacgaaattaaatcattatttgaaaatgatgtttctgatttaaccgtaattttttcatctggtaaacttatatcggaagataagttaaacaaaggaaataatgtttatgaatttaaattttctaaagaaggctcattcaatctatcaatagatgaacttaaatcaaaaatcgaaagacaaatagctgattgtgaacaaattgaagaaaatattgccaaatcacagaatctttggaaaacatcttcagttaaccttgtagaattattaaacaaaatagaggaacaaatagttatataacgtgtgtcttatttactggtttcaaaaccttttttataaaatatatatcgttaatttaatttaatttataaatgcaactgattaaataatttatttacaggtaatatttattacatttaagcactgatttcagcactttcaggttctggaatttgattagcttcattaattttttcatcaactaagttttgaataaccataatttcctttgatcttggaataactaatccactttctctatattcaacaatattttcaattgcaattttgaaaccatctaaagtagaaccattttcaaaaactttgtaaacttcaacaatatctttaagttcagtaacagctttttcctctatttgacttgaaaatttatcaaagtataatgatgaaacgtattttataccttctaagaattcttcatttataataacagattcataggtagagttaataccaaagatagcatattgcaatctttccaatttatcaaaccattcatcagtttcaacattttcttcattaagatattcctctttaaattcttttaaatattcttctccaacaactttaaattcttctcttgcatttcttaaacctgcttctctttcacttagtacttgtctaattgaaagcatagagttctttaatgcagattctaattccatacattgttgaatctttgaacttgaaatatcttcatataaaactgcttctctttgaattttgttcatttcctttaaacatacataccataaagcatgtaaatcttcaaatgatttttttcttaaatcttgaacagtccacgatctaccttgaatatctaaatcatcaacactacgtacaaattgcttttcatgaaaaaattcccataatggatgatcttccctgattttgaggttatcgatggttggtaaaataggtttacgtaactgcacatcatgtggaattctatacccctttgctctcgcaaatctggctgccaccgtactgaatcttgcaacacctaccattgtcgatactatccagtgtaaaaactttcaaatatttaatcggcctgaaaagaaaatcactctaaattcatgtcgacgaagtgaaattttagattctataggaaaaaaagttcacacttcggtcgatcgactgtaacatgaatattatacttgttctatccatcatcatcatttcaattagtgatatatactgtgaacagagacacactacaccgatcgatgttaaaacagatcagacactcactacgactactgaggttttattccaaagatgttgaagtggaaacaccaaaaataatgaaaccaaaaacaccacttcaacaactacaagaaatgaatgtgaaaattcctaaggctaacaaaatgccaagtcgacctaaaatacccgaatctgatataattgagaagtttattaaaggtggtacagggaagggaggacagaaaattaacaaaactaactcaaaagtgcaacttactcacataccgacgggtattgttcgttacatcccaagctactcgttcaagagaacaaaatcgtgataaggcaagggaaattcttgcaatgaagattgaagagatggagaaaggtgtgatgagtaggaaacaaattgtgattgctcgtaaacagatgttgaaaaagagagcaaagaagaagacaaaaagtaaatataagaaagttggaagaagaaaagaataaaagcattcgatgaagtcgttatcgtagtggattaattaagtctattgggaatttcctgtctatataatatatataaaataataacattagtacatgtgttattgtttctaatttgagttttatacaattttactcgttttgatccatttggcttgtttggcatacgctttttctccatgatacgatttcaacactttatctaattctggatcatgtttgagaaacatttgaatggacttgtttgaccaaataccagccttcatagctaataattgtacaccattagtattgatacagttaacaatacattcttcaacagaactttttattgacgtacatcgataaataagaaaaactgtgtagtattcttgaacacctacctttaatagcaatttactcaattctttaggtgatattttatttggatgttcatgaaatatttgtcttattttcttaatgagttcagatttgtcattaacaacttcaaacttgataggttttccgtgtttacgttgtagtttcttaaacggagtttccataaattcagtagttggttcgtcaacaaattcaatttctggagtgaataatggcatactcgatttttgggagtctgatacatttgttttttgagattcttgtaatatatttaatttcgagtttttattttcatcattaactgaattctcaaccacattttccttttctcttctttgatcttccttaactagttcatcatcaatgttaccataattctctggactttttggactaactttacttcggcttccaatatcgttatttacagattgattatcattatatgcaatcattttcctgaatggattttcaaattcaaatattctgccatcataatctggaatactagcaaactctataaactcatcaataaaatcatttgactgtggtacatgcggaaagaataatctaggacagtcagttttcttgatatgttttctagcttgtaaccactccttattagctaaattcacaggtaacggagtttttccctgttgtctttccatgatataatatttgatgtaattggtaataccaaagattgatatataattcttgaatcgttgtctccaagactctgcagaatgtgaattataaacaactgcaaatttatcatagaaattagttggaaagatgacagtttcaaaacctttctcatctgtgacaatatccaatttgaagtacactgttttacataaaatcaaatcatcacttgctgtatatgcagttaacttgtttgtaatcattgtagtacgtaggtacttaccatttgcatctttcataattctatgattcgcatctaattgataaacataacccaaattaaactttaatgtacgcattctttctctaatagatgttgcagttctatgtctattacgaaagtaaggtaattgtgaaataatatcataaacactatgtcctttaatacccatccagtgacgtttacgtaactcttctttcaaaaccatatcttcttctgctgtaaagtatctaacagaagtgtcttcataccgcgtcatagtcatcgtttcatatgaatggccagtgtttaccaatgatctacttaagttttcaaagtcgatgtcacccaaggcatcattataattagtttcttgttgaattttggaattattaatagtgatcctgttctcattattcttttgtaacgtgtcctcctcctcatcttcttcaatctcatcatcatcatcgtcttcatcctcttcatcatcatctacaacactattattaacattactattgtcattattgatgttgtcattgatgccattattattgctatcattgagatttaaatccatttgttcattacgtgttttatgagcatactgttgtggaacagaatcattgttattgttaggtatatgtattaaatagtttgaaaattcttgttgtgcaccacgattagcggaatcttgaataacttcatatgaatatacatgtgcattattaagttctttgggtataggttgctctttgcttgcaattataatacagttctgacttaaatcagtaacaacatttcctccatttttgacaattatatgaactagcttctcactgtagtttaatggtggacataggtaaaaattatatggtttttgagccgcatcaataaacaactgcatttttcttgtaaattttcagatacagtacaagtaggataatatacagatgggatgttaatgtctaggagaatgaataggttaaaacttgttaaatgtaagtaagaatgtatgtttatcgagaataaacaacagtaactactagttaaaattttttttagtgtgaggtctacgggtggcgacggtgccagtcattaaagttttattaagataagaacgtgaagatttattaagataagaacgtgaagatttatttcagtgctagacgtaaatctgtctcttttagaaacatcaattaccattggagtgtatatcattgatataatgagtcaagagcgtggacgtgcacatcactctttcaatactaatgttgcaattcccaggaaggcacgaaccgtctccagatcacgttccagagaaagatcaaggtctcgttctagatcacgagatagattcagagatctgtcaccatttagttatgattcccgttcacacagcaattttgacgatccatttcatactattgcagaggatgatgaaaatggtatagaaatgggagttattctaccacattttagcagcacttcaaactcaggtaagtttgaaccactaaatgaggaaacacggaaacattcaaatgatacccaaccagacacagattcagatacggacttggatttagaattaggaattaatatagatcaaaaattaaatgcaaataagagacgatggtggacgctggcgccaagcagtagtagtaagatgtcattccccgcaaaagtagataaaggggataaagttgtgttgccagatttcacattacctacctcatcaccggcagcacgtatagcaccaaaaattaaggcattatcaccaaggagatcacatggtcaaattaatgttcatgtttctggagtgaaagaaagagagaaatttgttgagaaattatgtgaatcattaatgcttaatggatgtccaagtcatcgtgttgaggaatggatacgagaaactgcgagagtattagagttaaaggttacatttattgcattacccggttcttttgttataaattttacaaatagtgaacgtgttgcaattgttcgagtttcaagtacaattgatctagggaaattagatgacattcatgatatttatgaaagtgttgttcatgatagaatgggggttcaggaagccggagatttgttaaatgagattggaaatagaccaccaatgaaggcatggctggttattattttatattgcttatcaagtgtttttgttttaccattttttagtggtggatgggcagattttggacccattgcagtcatcggtacaatattaggtgttttaaattttttacgtggaagtagacctgcacttaatggtatagctgatttagcaattgctgcaattgcaggtgctgtgggtagagcacttggaggaattaatgataatggtttattttgttttacagctgttgttttaggtggattatgtatggcattaccaggatatgctgttttaagatcatcattagaacttcaaggcggagcagttatttcaggagcatcaggattactttcagcagttatttattcattgattttgggttttggacttttatttggaattgtttttgttggatggattgacaaagatgcaactacagtagtttcatgtgaatcgctatcacaatcagttaaaatgggtgcagcttggcaatgtttatttataccattatttacagtttgtcaaggacttgtatgtggagctcattggagacaaattccagttattgttattgttggaagtgcgggatatgctgtttcatatttcgttggacagcagacgacggtaacaggtattggagcagcggctggagctgcagttatgggagttatgtcaggaatttatgatatttggctacgtaatataccattgttgggtagatgtagtacaagattagcatgtatgattccagcaattttcaatttagttccgggatcacttgctgcacgtagtggtattgcagcaggagttgcagcatcatctaaagctaatggatctaaagcaacagatttaatcggatttgcaggtacaatggttgagattgcagttgctattatatccggtctagccgtcgcgtccatgataatggctataatttccccacgtaagctacaaaattccattggattgtaagaatatatataaatacggtacagcgaagtgtataatgatgatatatgttgtgtaagtattaatatgcactattaactatcacagtttaatcagagagaatcgatgtgagtatatttcgcaataacgacatgaccctcagtgataaaacggttactatcggaaagatcagaaagcttctgaaaggttccgcgcctccaagaaaaagtattttttaaatttttttaaattatatagggattgtcatttcatttttaactattttactgagggccaatgttttttctgttgtgaatgtttataaattaattgtagcttgcatcttatacgttttactttctttttgtttttctatttgttcaagttaccttattcttatttaacaaaaattattaaactatcaaaatggattcatcaaaaattattgcttactgtattgcagtcatcttaccaccactttcagtccttatgaccagaggtgtaggtatggatttaggtattaacattatttgttgtatctgtggttggattccaggtatgttacacgcttgttacattgtttccaaggaagaataaatgtgctgatcaaatcatgttcaattcaattgacaattatatctctttttttaatacatttcatgatactatcgttttataacttcttttttgtttaattattttaatctcacatatacattttatacttgttattattatttacttacttattctataattaaatataaatatgaacattagtacaaacattcgaaaattataattgtaataagcctacttactactccaggggcatcctcagattaccggtacctatattattaagaataataataaacaattttgccacccattcgctctctttttatatttacgctcattactatttatacttactagaaaccctaagaaatttctggggaatcatcagagtaaacttcaatatgcagtgttacctatgcgttcattaaaacattgtatcgattgttataaatatatgattaccatgttattaaaggtagacgtaagaaataacactcaaagataccatgtctaacagttaatttacaggaatataatccaactttcacaaatataatctaagaaattcccttatcgggtcaaaattcttcgcatggaagcaattttataaacctattagtatttacttttcactatataaatttaaaggagcaaaaggggcacattttcaaagctaaataaatcaatcccatcaagtcaatatatttttatagatccactaactttttgccttccttttttatattaagtggtatctgtagcatcttaatattgaattaccacaaatggaagaaccttcagtatttactttatctaataagcgtataatgagtgaaaagttaaagagagctagaacttatgcaggctcatcctctatggttaatccaatgagagatcttggattatacaattatcctaatgatcaaaaagttttcagtagtaaatatgattccaatagtgtaaaatatcaagatgaaaatgttggaggtaatcatcaattaaattcatctttcatttatcaacctcaacctatcaaaataacaggtttacaaccaagatttataaatagtgatgaacaaagaagtttcaatagggaaagtttagcttcaactatggaactttcaaatgatccaaaatcgccaatctcttattcaaccctcataaatacaaccggtcatttattaactttaaaaaatgacgataatgtttctaccgacgagtttattaacttagatgaaaaaaataatgattcaaattatacttttaataaacatagtaaatataccaaagtggatatcgaaattcctaaagttcaattagcagattcagacgagcctttagatttatcatcaatttcaaataagtttctaacagacacctagtcccttttatcaaactagggaatttaatccagttgatacaacagataccggaattctattgaaaattttgaattatgaatttgaaagtatcccagatgaatcagatattgatgatgataatgataatgttgatgattatttagatgaaaattctcaaaatattgttccatggtatcgtaatattctcaattttaattttttcagaagtgttattgatgctaataaagttctttcaaaagatgaatataatgaaaaattcccatgggataagttttatgaactagaacttttcgaattccccgaaaccgatgatattaatgtacttaatgaagatatgattccaagatcttatcacgataccattgctagtagcacagacttttctaaaaagcaatataattatgtctctaccagaagaaagcctaatactgagatataatatattcaaataattccataaatattctaatttttttatattataaataatacttatttttgttttcttgtatgtcaatttttgtttttaatttcacgtatttctaataaatttgaattttttctcagccctttcatgaaactagaataaatacaggcacctgaccattctccaatactatcgatacaaactagttgtattttttttttcatttgtttttctatttcttgatatagtaatttttcaaaccctttaattttggttaatccagagtttataattatcttcgaagatacttcctgtcgtatatcaactgggagtgttttttcaattaaggttgatacaagttcacttatttgtaactcatttatatcatcagacaaatttgtttgtttattaattaacactttttggatagtttctattataatttcagcttttattgagtagttcccacaaataagttcatctgacggattcatatccaaactgttgattgaattcaccattttttcaacatccctgaatgaaatatctgaaatatcaaaacccaaatccttcaattgtctaaggattgcataatgcaacatacatccagctctatctgtaacctgcgtgtaattagtcaacagtctattatcagaaacaacttcaatacaagtatacgaccaccctatatctattacaattgaagaatcagaacctgatgatatcgtactcatcaaagccgatggtaatagtacaactgcacgcattctaaacctttcaataagtgatttagtaatcacattgagataaatgtccggaaatagggatttgtgtaaaagtattaatttagcattcattgttgaaatcccacatttataaaaaatttcagtgaaaacctttgattaaatgattatgaaggtccaacttgaataaatctaagtcattatagatggaaatattaggattgaataaataattaaaacatgaaatgtctttgttttgatattgatttatttcatcaaaaggtttattatcacagataaaattttgtttctctgcaaaatgatatacattgaaaacttctaatggagtaaaatatccttcataaccacattcaatagttctactccccaatttcagtatgatattccttcccttctccatctaatgagttgtgaaaaaatcgagtttgttcaattttacacaattttgtaaattataaatttcagtacaacttcaaaatttgttcaccgccttaatgcgataaaatcaaaacaccaaaaattaatttgttacacaaatctttaattttactaagatttttggcacagaattatttaaaatatatcaattcacagaccatgagaataaaatatagataatataataaaatacaagaaaccagttactccgattccacgggagtttcaaattaccacactactgcaaacacgtcaatcgaaatatatgccttagcgaaggctcatcatttttctttgtatttcaaagcatttttcattttggaaggctcagttgttcatactttactatttcttcttttatctttacgaacaatagaacaaagatgtctagagaggaagatatggatggaatgattggagctggatctatcatcttggtagatcaattacaagatttaggtattaacgctggtgatataacaaaattaaaagcagctggtatttattcagtttctgtaagtaaattgaaaaagttattgtctatttatttgaatattcttactaacataaacacatgcataaatttgaatagaccgtaatgtcaacaacaaaacgtaacctatccaaaattaaaggattgagtgaagttaaagttgaaaaaatcaaggaagcttcaaataaacttgttaattgtggatttgtttcagcattaattcaatgtgatatccgtaaaagagttattaaaatatcaacaggttgtaaatcatttgatcaaatgctaaatggtggaattagtactatgtctacaactgaagttttcggagaatttcgctacaggtaaaacacaattatcacatacattatgtgtaacagctcaattaccaaaagatcaaggtggtgctgagggtaaagttgcatatattgatactgaaggtacgtttagacctgaaagaattcacgaaattgcagaaagatttggattagatggtaatcaatgtttagaaaatatttcatatgttagagcattaaatagtgaactatcaacatgagcttgtagaacaattaggaatgcatttgagtcaaggtggatatagattaattattgtcgattcaattaatatcattatttagagttgattatagtggaagaggagaattaggtgagcgtcaacaaaaattgaatcaacatttatcaaaattaggtcgtatggctgaaggaatttaattgtgcagtatttttaacaaatcaggttcaatcagatcctggtgcaagtgcattatttgcaagtgttgatggacgtaaaccagttggtggtcatattttagctcatgcttcacaaactagaatcttattacgtaaaggacgtggagatgagcgtattgctaaaattcaagatagtcctgaatgtcctgaaggtgaatgtacatacgttcttggaagtggtggtattatggatgtcagtgaatagtaaatgttcagggaggcttgaacaatattaaaataaggacatataaatttgagagacaatgcttgcaaccaagtaacgctaagtctgtcactgtctcgctatcagtaatttatcttttgctagttttaattagagaggagggttttttttaataaatccacaattaattagtttgtgtaactctttttagtctgtgtgttgatattattatcatactcataaatatcctacattgtttcattattggataggtagaaagattctaatactcaaacacataaataattgaaaatttgaaataatgggtgcagttttatcattaccacttttgcccgtaagtatagtaggatcatggttatcatcatgtatcggagtttccatctgttcatgttgtatgaacaaaaatgttaatccattaatgagaactttcacatcctcaattgcaactcgtataatgtatgcagttattttcatgtttaatagtatattgtcgtggatgtcgttatctaattcaataacgaaactagtcgagaaatttacatgggggttgtttaaatttggtaatatgtattgtaaagaagaggaaggatgtattggatttacaagtgtccaaagaatcaatttttcattaggattattacatttaatacttgcatctttattaattggtgttaaatcaactagaaacccaagagcagttattcaaaatggatattggttaacaaaactattcgcattgacatcatttattgttataagttatttgattccggatagtttctttgttttttggggaaattatattagtattattttcagtacaatgtttattggaattggattaattttattagttgattttgcacatgaatgggcagagacatgtattgaaaagattgaagaaggtgaaatttcattagattatacagatgataacaatggaacatgttctgaagtttgtaattttgaaggtgcaaacttatggaagaaattattaattggtggtacattatcaatgtacaccggagttatcattatgactattttgatgtatatgtactttgctcaagaaggatgttcaatgaataagactgttattacaatgaatcttatctttacattattaattacagcattttccatttcaccgacagttcaggagtataatccaaatgcgggattagctcaatcatcgatgtgttgcatttattgtacatatttaatattcagtgcatgtttaagtgaacctgatgataagttatgcaatccattaattagatcaagtggaactagaacaattacagttataatgggagcaataatgacatttggagctgttgcttatacaactacaagagcagcagcaaattcagcatttaatcacacaagttcaacatctactactttagatacattcagtagaaatgtattaacacaacaaccaactgcaactccaagtatgagatacgaagcattaagacaagccgttaatgaaggttctttaccggagagtgcattaaatgattatttaagtgatgatgaagatgataggtgataatacattttcatatggtgaagaagaaagagattcaattaaatacagttatgttttatttcatattattttctttttagccacacaatatattgcagcattattaacaattaatgttgcagttacaccatcagatgaaggtggatttgttccagttggtagaacatattttaatacatggcttaaggtatgcagctcctgggtatgttatttactctatggatggacacttgttgctccagctgtatttccagacagatttacataaagattaatgattttaaggttatgttcattaaagattaccaaatcaacggttgttattagttatatagcttaggaattaagaattaaggaagaacaataagaataacagcgaacagtgaaaaaagttttccattcacattgtcagtgatttaaactgtgaaatttaaaaaaatgaatttttctcggtttcgtggtataaaagtgtcgcaatttccaattttttttgatggaattgggggttgtatattgatctggaactattttttttatttttttatttgattgtgttgagaatattattattttgaatgagattgatataaatttgataacattttagtttacttatattactagtattttaatttaattcaatccaattaattaattgatcatttatttcatggctttcattgattgatagatttaataactttatttaacattattttattttattttaatttattaattttatttttattttcatattttatatttgggttctcggaatatacgatagatagatataattatgtcaagtgatccacaatttgacaatgacaacaatacagacatagtcgctgatggaggagattcattcccaggattagaaggttatcgtcgaatgaagacacatttcccatctgcaagagttaagaaaatattacaaagtgatgaagatgttggtaaagttgcacaggcaacaccactggttgttggtagagcagttgaattatttatgtgtgccttagttgaaaaggcaatagcagagagtagtaattctcatacgaagaaaataagtgttcaaatgttaaagaaagttattgatgataacgaagagtttgatttcgtagctgatgtatgtgacaaatacttagaaaataaagataacaagataacaaagataaccaagataacaacaaacaggaataaaatacatcattttcttatgatgtaatgatgaataaaagggccccccaaataataggggggtaaacatatagggactggcctcaacctcccatcggaaatgatacacttttttttaaagttgctgttttccgggttattatattttttatatttaaatgatggttttcttgaaaagtttagatactttcatctactttatatccctttttatataccatataatcagtaattgaacctgttgattcgtcaattatattattactaaaattaaaataaagaaaataaacagaaatcgctatggcattatcaccagaagtttattacgccggagtcgatgtcggtacaggatctgcaagagctgcaattgctgattatcaaggtaatattattggattatcggaacgtccaattacaagacatgaactgaaggaaaatcatattactcaatcttcaactgaaatttgggatgcaatttgttattgtgttaaaactgcaattcaacaatcaggtgttgatagttcaaaaattttaggtattggatttgatgcaacttgttcattagttgcaattaatgaaaaaagtaatgaaccaatggcagttggtcctgattttgatgattctcttgaaaatataatactttggatggatcatcgtgcagaaattgaaactaatgaaattaatgaaactaatgatgattgtttaaaatttgttggtggtaaaatgtcaattgaaatggaattaccaaaaatgaaatggttgaaaaatcatatgccaaaaaatatgtttaatgaatgtaaattttatgatttagctgattttcttacaatgaaggcaacaggtaaagagacgagatcattttgttcagttgtttgtaaacaaggttatataccaaatggaattacaaatagaaatggttggtctaaagaatttcttcataaaattaatttaccagagttagcagcaaataattttgctaaattaggtggtttagattgtgttaatggtaaatactttaacaacctggtgaaacaattggtccattgaatgcaaaatctgctaaaatgttaggattaacaactgattgttatgtaggatcaggtgtaattgatgcttactctggttggataggtactgttgcagcatctacaaatttaccaattcctgaattaattgaacaagataaagataaaagtggattatctaaagctacaggtcggttagctgcagtcgcaggtacttcaacatgtcatatttgtattgaagaaaaagaagttttagttcctggtgtttggggtccatatagagatgttttaggtaaatcttattgggctgctgaaggtggtcaatcgatgactggtgcattattagctcatgttttatcaaaacatccagcttatgcagaattgggtattatgtcagaaagttctaatttatctaaatttgaataccttaattctagattggaaaatttgaaaaagattagaaaggaaagaagtgttgttgcacttgcaaaaaatttattcttttacggagatttccatggtaatagatcaccaatctcagatccaaatatgagagcttcagttattggacaatcaatggatacatcgttagattcattagcaattgaatatttagcagcttgtgaatttatcggacaacaaaccagacaaattgttgaaaaaatggaagaatcaggtcataatattaaagctatttttatgagtggaggtcaatgtcgtaatggtttattaatgagacttttagcagattgtacaggattacctattgttattccaagatatattgatgcagctgttgtattcggtactgcaatgttaggtgcagttgctgcagaggatgcacttaaggatagagaaggtaatgagaagccaggtacatttgctataaaaaatccgttgttagagaagaagtttgctttagatagtgttcctgcatcaccatatactgcaccaacagctacaacttcagttacatcaattagtgcgatgaatcaacgtgatggattcccattcccattaactcaaattccaagattaacatcatctcttaacttaacagattccgatgatttagataacaataatgataattcaagttctgaaggtataatctcttttaatccatcatctactccacaacaacaaagtttaagtgataaaagaaaaaacttaccattacaacaagaagaatcagtttcagatcgtctttggagaattatgactcaactttcaagtacaggtagtgttatatttccttcagatattacacatcctgataggaaactactcaaaactaaatatgcaatatttttggaccaaatttcaacccagcaaaaatatagggacatggtttccaaaacagaagatgctattgcttcctatttatctatttaatgattttgtatagttttatgaacttataactaaggttaaggattgaacatattgaggagaatttctacttaaaatagatatcggacttataccatactggtcccaaatattttttctaaaactccgagattacgtgcaatttaagccagccaacttcccgcctgattccgctggggggcatctccttatagtaaaaactgagcggcggctaagtcactatttctcgtaacttaaccaaggagtggcatgaggccacacaatacgagaaggggtataaatagtcgtatttccgtctgctgatacttgaatgtcttttcccttaaattccagtcaattgacttttcatagttgaaaatcattcgacaatcatgactttatcatctcatattgatccagataccattgaagacagaatcttccaaaattctgtcagtaaagctacacttattagtaaatatttcaaaaagttttctggtaagtcagatcaaactaaaaagaatcttcaagaacatcatgaaagaattgttgcaagattccatggtgttgcaaataaatataaattacctgatcatagtatggcagcaaaacaggcatatgatattgttcatgatgatttaacattagatggttcaacatctcttaacttagcatcatttgtcaatgttcatactgaagaagaatctgaaaaattaatcgttgaaaatctgactaaaaatttagctgattgtgatgaatacccaatgttaattgaattacaagatcgttgtatttcaattattgcaaacatgtggcatgcaccattattagttgaagattcaggtattgaaactcctcatcatagtcaaaatttcagtagatggaagagtagagcaattggtactaccatgtactggttcttccgaagcaattatgcttggtggtttagctatgaagaaaaattggcaatcaaagagaaaggctaaaggtttaccttatgataagccaaatattttaatggcatcatgtgctcaagttgctttagagaaatttgcaagatattttgatgtagaaaatagacttatcggtgtttcagataaagatttcctaattgatattaataaaattaaggaaaacttagatgaaaatacaattggtattttcgttattgttggttcaacttacacaggtggttttgaaaatgttgaagcaatttctaaactattagatgattacgaaaaagaaactggtaattggattccaattcatgttgatggtgcatctggtggttttattgccccaattatttacccaaatttaaagtgggatttcagaattccaagagttatgtcaattagtgcatctggtcataaatttggtttagttacagcaggtttaggctgggttctttttagagatgaagcttggttaccaaaagaattaagatttcaattacaatatttaggtggtttggaggaatctttcagtttgaatttttcaagaccaggttatcaagttgttcatcaatactataatttcttaagattaggtagggctggctattatgatatttttgacaattgtttgatcaatgctagattattatcattattcttggaagaaaccggatacttcacatgtgtttctaatttacatttacccgctggtatgagtactagagaccgtgatccaaaatgggatattagtctttcacaatcatttatttctgaacatgacaagttcaatgctgctttacctgttgtttctttccaattaaccaaagaatttattgaagattaccctgaaattccacaatctttaatctctactttattaagaaataaacaatggattatcccaaactatgatttaccaagaattaatttaccagaagttgatgagaatggtgaagaacatgatgatccaagtttacaaaatgaagtaaatggtgaaaacaaccaaattttaagagttgttgttaaatacaatttaactgctcaattattagataagttaatgcatgatatagctaacgttgttgaaatgttaatcaaatctgttgaattagtcagaaaaaatgttaaagatttaaagagtagtggtgaagaagttactaatgatttagtttacaatatgttattaagtatttcaaatgatggtgatgaaagattaatcaagttcaagaatgaagacaagaagactgacgccaaagttgtttgttgagtagttttacattcactcattttagtttgaaacttctccttttaagtatatttttttgattttatgcctacttttatttataatatatttattaactaccttgtgtattgagctttcatatttgatatataatttctttttacacaattaataaaacaaacgctaatcacaaaaatctcttaaccttagatttagccaaatttaatttcgtagtactctcatcaacatgttggttcaaaccgttaagaatttcattttgaattgacagttcatcattaactgcaacacctatttgtctttgtcttacaatgatttctcttaatgcttcaagattttgatcttgagattccattttttctttctgtagttggaataaatctttattatcgtatcttttagtttcttctgtttcttttggtttaccgaacgtcctgcgtgagcttgtaccagttgaaacatttgatgaaaataaagacgctgcaccttcttgtgacgttggcttagtgacggattccttaaagctcatatcagtcatcattttagtcaaatcttggtattccttattcaatgacatcaccatttctttacgttttagtatctccccataaccaagatctttacaatttgataaataatctttaagtatttgtattttagtctcacctatttttaaactctttctggcacttatgatattaccagaattaaaagttttggttctagcatcttgcaataatgttttcaaaaatctgaatacatccatccattgttgagccgacattatttctgttattgagttatctgtataatcaatgttattatcattaaatccctttttagtatttgaattgttttgagtaccatcaccaatcatatccatttgcataaatactgatcttggtatattgtaaaacagcaagacatttgaatcatttcttaatttcttattgtttaataattctgatgtgaatctaatcagtccaagtttacgttcttccacttgagctgatgcactcttgaaaaaacttgtgtaccttgacggtaaaattgggatttcagactcactataacctgtgtcaattagccttcttcttaaagtaacaaaatcagaaaatcgtttactcacaaggtattcataattatttagttgattaatgaatatttgtatcactaagtcatataatgtataattgtttatattagttgtatttgtaatatcaacagatattcttttattcgttgagctgccggtgtccattatgtatattgctggtatttatgtggcaagaactttataaattgaagaagaaaaccgccatttttgtgtattaaacaaacctgcctccatcagaaaaaaatatcaggcttacaaaaaattgtcacttcatgcatttcacttcttttgttcttaactagacggggttttatattagataaacagctaatttgtataatgagtactccatatattagtactgccactgttggaaatgcacataaaagtgatattctggatgttgaagttacaagccgattcactgtcactgtttcatctgatggttttttgaaactttggagtaatgagagttcagaaagaagtttacataaagaagtgctcgttgataaagtcggtttacatcatgtttcagtacttgaagacattattgatatgaaaagagtaatgatttttgccttggtatcgttttcaggcactctttccctatggaagtatgatcttgacgcagaggagttaattgatttgaattttgattataaaacaacaggtttgtcagctaaatcattattttggtttccaaaatttgcaattggaagtggtgaaattaaattcatttgtacaactgtctcaggtcgtactgcagtttttgatgttacagttgaagaaggaaacccaacccttgattacaaaggtgaattatactcaaatgacaatagttttgctacatgtgtttccatagatatcgataataacagaattgttgttggtcatcaaaacggaaatttttacttgtatgatataaaacaattacttttatcatacaactttgaatcttttggaattaaaaactcaaagtcattgaatattgttagaagtgtcgcattctcaccaaatggggagttattagcgatagccaatgattcaggtccttatggtacaatctcattatacgatgttaaatatggtgaatacttaggagcttttgtaatctctacacattcaagtaatgttggagttggaaattttgcacattctaaatggtgtatgtccattgctttcaataaagatgggaagaaacttgtgtcttgtggtcttgataatctcataaaaatatgggatgttgaaagtagatcatgtttgaatacactaaagcttaacgccactgatttagaagatgaggacgttttgaagttagacgatatggatatttcagcatgtacatctgtaacatttgtagagcaaggtattttcaaagaagacggacaaaacgatggattggttgtcgttggttttgatagatcaatccgttggtttagagaagctggtggattatgattctgtatagctaaataaatgtaaaagatatatcaaaactggataacggttttttataaagatagtgatataatagcttcgttattttttactcatataacctgtacttatgaaagattcagcgtattctttcatgtaacgagtttcatcttcaatttcatcacactgtttcttttgtttgctaataagatgtagaagtttgactaattcggctttagattctttaatttcttctttcaactgtgaatcgtggttttccatattaggtgtgtttatttagaagaaggtcgagtttgttaatgattataaaaaaccgaattaattggcgatgttaatttttaaaaaactaatattcaagtcaatacacattttttttccaatatctaaaatttactcctattccccaatttttctccaggcaagatcaatatcatcaacaaaatatactgttatcatgtcggatgaaaataaaaataactcagagactttgaagcaaaattcagcaaatgttcttatcaccgagattgaaaaattgtcattagaagacaactcacaggatggaaagaccgaaccaacaaaaacaaaagttagcagcaaaaaaaagaagtctggcaagatgccaaaggatcaaattactccccagtatattgaaaaaatgagaaaggaaagagaagagaagaaaagattgaagagagaagctttaattgcacaaggtattgatccagacaacgacaacaaatctccaggatatataaaaagagagttagtaacaattccatgtaaagatagaagtgaaaacaataagagaagtgttgtaacgcttaagataatgacatacaatctgttggctcaagcattgatcagaagaactttattccctaacaatggtgatattttgaaatggggtaagcgttctaaagtcttgatccaagaattgaaagactacgactgtgatattatgtgtctgcaagaagttgattttactcaatataaaactttttggagacctgaatttgagaaattaggtttcattactaaatttaacagaggtaccgacaagaaccatggagttgcaatcttcttcagaagaaccttattttctttaattgacacatgtcagatcgattttgacaaagaaaagtctggtgatatcgaaccaagaactattacgaaaaacgttggtctaattttgggtttagcattgaaatctgatccatcaaaagtcttaataattggtacagcgcatttattctggcatccatttggaacatatgaaagaacgagacaaacctatattgtactatctaaatctcaagaatttgaaaaaagaattagagtactacatccaaatgttaacaaagtttggaaattttttggaggagattttaactcgcaaccatatgattcaccatatttgtccatcactagtaaaccagtcaaatatgataatagatgtaaaagagttatttcctgctctacgtcttttcaatactcaactcgtagagaggggggatctggtgaagaagaggaaggtggaaacgttgaaaagtttggtgagaatcaaccaaaagatccagtgcctgaatctttcgaagctacaaaagaacaagaattgcttgttgaaagaattgaaaaactacacaatagtcaaccattgcgtgcaatttctctctattcagtagcatataaacatattgatccaaaaaatgctggtattgataatgataaaaatgaaccatttttttcaaactgggccaatgcatggcgtggtctgcttgattacatttttgtcatttgtgactgggatctgaaatctgataagagaggaaatgaagagattgaaacatttgaggaagttactgatgttgttataaataaactattgaaactgccacatccagacgaaatgggacttggtcaaccgcgtgagaatgaatatcctagtgatcatctttgtttgatttcagatatttcattaatggagtagacttgtatatgaattatatatatatatatatttattcatcacatatttatataactaatagactgtattaatagacacggtgtagaacctaatccagtcgatcgacaaaatagtttcccaaagaggaaataaacgatccatcagaaaaaatgggattcatgctgccaaaaatttgagtgtaaatttgaaaatgtaaacaaagcgagaacgaaaaataaatgaaacgcaaaatgtaaacagaggaattaaacgtgaagtttgtatatcagactctgataaaggtgtattctttatatacttgtactttcaatcaagacagagatatacaacagacaatatgagagaagttatttccgttaatggtatgtactgcactgtttcaatatgaacggtaacataattttcattctcttcgcaaggggtgaaggcaacatcaagttgaaacactaacgccattagttatggttccatttttaagttcttttatactaacattttgaatttcttttatactttttactatagtcgggcaagcaggttgtcaaattggtaacagttgttgggaattatattccatggaacatggtatcactcctgatggttacttagaagaaggcttaactaaaccaagaggtggtgaagaaggtttttccacttttttcagtgaaactggatccggtaaatatgttccaagagctttgtatgttgatttagaaccaaatgtcattgatgaagttagaactggtaaatataaaaatctatttcacccagaacaactgatcaatggtaaagaagatgccgcaaacaattatgcaagaggtcactatactgttggtagagaacttttagatgaaattgatgacagagttagaaaaatggcagatcaatgtgatggtttgcaaggttttcttttcactcattctttaggtggtggtacaggttcaggtttaggttcattactgttagaacaattctcaaatgattatggtaagaaggcaaagttagaatttgcagtttatccatctccaaaggttaacgcgagtgttgttgaaccatataatactgttttaactacacatactactttagaaaatgcagattgtacctttatggttgataatgaagcaatttatgatatttgtcgtaagaatttaggcattgctagacctgatttcaagaaccttaatggtttaattgcacaagttatttcatctgttactgcatcattaagatttgatggttcattaaatgttgatcttaatgaattccaaacaaatttagttccatatccaagaattcatttcccattagtatcatatggaccaatcatttcaaaagatagaatcaatcacgaatcaaactctgttaatgaaattactgcagcatgttttgaaccaggtaatcaaatggttaaatgtgatccaagacaaggtaaatatatggcaacatgtctgttatatagaggtgatgttgttaatagagatgttcaaaatgctgttgcaattgcaaaatccaagagtactgtccaattagttgattggtgtccaacaggttttaaaattggtatttgttatgaaaaaccaacacaacctgctgattctgagatggcaaatgttgatagagctgtttgtatgctttcaaatactactgcgattgcagatgcatggcaaaaaattgatagaaaattcgatttaatgtacaagaagagagcattcgttcattggtatgttagtgaaggtatggaagaaggtgaatttgctgaagcaagagaagatttagcagcattagaaaaagactatattgaattaggtgctgattcatttgttgaagatgaatattaattttaacaaaatataatataagtcatgtaaattactcattaaattaaaatcaattcaattcaattcaaaataactttaaacttaaactaaaaaaggatagaaataacaaattaaaaaaaaaaaatgggataataaaatcaaagataccaaccatcatttgaatcaattacttcaattttcaacaaaattacaactattcttttctataattcttgctatacacaatttttccagtttctacttatcaacttacagtctactaaacttttttggttgaacttgacgttaaacttcttttcatcccacctttgttttctttttcctccttttttacaacttttcatttagaattctctttatattattttctttttattatttaaatactgtttcttttaataatataaatcttacgtaatgttcgaaattcgcgccatgaaaatcattttctcctcaaattcttccttttcataatggaagaatgattatcctttgcttgacggacttaaaaaaaacttctccattattattccaagctctctctgaggatagacaaagacattgaacaatattagagggtgtatataggctgtatattatggttgtataaagtgtagagtttgaaaagacactaaaaaatgtagaattttttaaagtagttaaagctcaatcagttttttatttcttaattcttcatcatcctcaataattctatgatgctataaatcaattaaacggattatcgtgctaatattctgtgagaataaaaaaaaatatattttacgcctttttttgccatcgataaatttgttcttactggcacttatatatcagtgatcattctataaagtatagttattgatttaaatcttgtcaagttaatcaataaacatttaattattactttggaaactttggaaaatattaataattgaccaactttttaaaaaattcagctttccaagattatctaacaaaaatttaatttatccaatattttgccttcgcctacatacatttacataaatatatctattttttaaacaacatctacatattttccataataaaacatcatgattgaatcacccaataacgataaaattaaaaagactagaaacagagttccaacttcatgcttacgttgtcgaaaacgtaaattaaagtgtgatcgtcagaaaccatgttcaaattgtgttaagggtaaaactgaagacctttgcaaatatgttttcgcatcgaaggctacaactgaaacagctgtacccaaagttaatttaaataatgaagttattaaacttaagctgcaaattaataaactcgaaagaattattcaaatgaataatattgatatgtcagaatatgcagatattctacctaatgcggctaatgatgataatgatgaccaaagttatgaagaagatccattagtttcattatgtgataagtttgatactatgatcatcaaagaaaatagagttttacattcaggtacaacatcatatgctacatttattgttggggacaaaaatttatctaaaatttttgaagcttattccaaacgtcatttaatgatttatgaatcttatcaacaaaagcaaaaaattaaagcatctgacttaccagttgatgtaagtgatagtcatttatcttggttaacagccaattcaaatgttgaagcaactgtttgtgatcttgatagtacatcaaataataaatttggtggattttcagctatttctgataaagtatcaaatatgcaaacaaagttagttttagatgttttgaatgatattaataaagttttacctccattgtttgttgttaatgttttaattgatcattttttcaaatatgttcatccactaatgccttatattgatgaaaaaatatttagagaggaacttacttatgttttgattgcaatgcctggtggaggatgtagagtatccataactcatcttcaaaacgcatcaattgtaagtttattacttattgttttaagatttgcttatttagctgttaatgtgaaagactatagtgaggatattaaagctattggaaatgatttcttagttgctatgatcaagagtgggtatgttattgaatcaaattttatgctactagctaaaagtttattaatgtcgttaccaggtgaagatagtatgtttaaaaaagttacattgcgtaatatccaaattttgttatttttaagactatatcaaggttatgcaccagagatgaatgaagaaagtaaggaacactcattaacattatcaattattattcaaatggctagattgctgggatttaatagagatcccgataattttccaaatatttacaaaaagaactccgagaaagttgtaataagaagaatatactataaattattatcattagatgttcataactcttttgattatggttgtccattaattatatctgataatgaatatgatattaagttacctacattgccagatgatcaaataaaagttttacatgatttcaagaagggattatcagttgaaaaatctggtgacgaaattaggaaacttgtatttgaaaactcaatcaacaaagatatcgccttagaatatgatgctatcgttttactaaaagagggattgaatgcattccaaaattttaaattatcagtcaaaacttcaagtttacataaagttacggataaaatccgaaattttcttgataacaaaattccgtcaatttgggaatatttgcaagacaactatgcaaataatcaattagaaaagttatttgatgttccaagagttaaaaaaattgaaattcgtataactgttcaatccatgttaatggcattttattatttgatttatattaatgaaatgaactctacttcagatagtgaaacatcatcatctggtaaggaaactaatggaaacaatggagaattgtattttgatggtaatgaagatggtgataatgataatgagcataatgttagtgaaagtccaaatgataaaaattcaaaaagtaaacattatcaaaaatatactgttagagcatttgaaacagcactttcattgtttaaatttaattatgattatattaaatattcaacacaatctgtgacattggatggagataataaacaatataaagcatttaaatttttttctgctaaatgtgatattttcattttacatcgtgttgcgattacatttttaagaccatttctatttttatgttcatttttcttgaaaagtatgaatagtgaacaaggtttaattttttctgattttattccaatgttttccaattcagttgatgcgaatgttgttttaaaatggtttgatattgatattgataatattcaagatataaatgttgatgatgaatgtcgattcccatttatattatttcaaaaaataaaagatttattctttttaaattattgtttaagaaatgataattttgtttgttggcgaaatactgttatgattaaattatttattaattattttaaactagaaaataatccaaaatgttctgaatttttaaatccttcacatttatcagatcaatcaaagaaagttagtgatcattataataaacataccagttctaatagtgataccacaccagaattgacaaaagattcaccatttaatatttctaaaaacttcaatccaggaagtaatttaccatttgttgatgaaaattttcaaggaactggtgattttactccaaatatgacatgtccatcattacaaaataatggtgaaatattaatggatgaaaatatatgtgttagaagtgatatggagaagaataatacatttattgatgattttttaaataatgcagttccaaataatggtaaaacagttaattttgaaaatgaaggaattaacttaaatgatttaattgttgatgattttgataatatgattgaagatattattgaagataaatttagacaatcacatagtaatatgggattatttgatggaccaggaatattaaatgaatttggaatgaactccttagacaataataatcataatggtaataataataacaataataatagtgttgtgaacactaatgatatgatgaatcaacaaggaattataaattcttcatcattttctggatcatcgtatacatcaaatactgaaccatctgatatttctttaacacccgatattttcctgagaacaccacttataaatttaaatttcactagtactgataaaagttgattatatattataatatatatatatatatatatattatatatgagtattacatatatgaatgataagaatttgctggttcaaataatgttcttacagaaattaaactcaagtactgatgattgacttattattacacaaataatacacatacaattccatgttttttttttcttttttctttttcaatttgaattttgaattttattatatttcgtttgttttgtttgtttcgttttactgttcctttttaatattgattatatacctgtacataaaataaaataaaaaaaaaaactcaaaattacaaatctataaaaaaaaatgcatatagtaaaaattataattcaacattaacgaaaatataatctgaattttttataataaaaccttcttgaccaacttgtaaatttgaagaagaaacttttgatttcaatgaagttgaccaattagttacgtcccattttagtccatgagttgtaattattgtatcattcaataatggtagtattccaacatttctcatattatgtcttgatttaattgaattaaagccaagtaatttaaattcatcagattgatttaatttaggcatatttataaaattttcacctggcgttaataggaaaatcaattcttcatgttcaggatttaaaattgtaaaattaatatgatttcttgataatttatatttgtatatttgatgaataattgaaattgtttgatcgaatcttccacctacaccacctaatacgaaaacatcaatttttttcaggggattttttaataaattatttaatttttcttcacaaatttccaattcatctagtgtatttaatgatttaagatcaatttgagggaaattaaaataagtatttattaaagaaactgatttattaaaatctgtataatattgagaagattgaagtaatttaatagtacctttatttgtataataagataaattttcgggagtagcagaatctaaatcacctataacataatgaggcttaattgatgatgataaattatgtaaatcagtgaaatttttcaattgatttataccaccatcagcacaaattattaaatctgcattatttaatatattgataaataattttggtggtatggttattttttgattaagtattaaaagtacatttgatgatgaagatgatgatgatgataatgatgaattacgatttaggaatgataatggatataataatgattgattagttttattaaaatggtgtgataaagaaattacatcatcattttcaataacgtggtccataattatatccgacatttttccgtgtatagattaaggaaatgaaatagatattaaatcaatttgccaaagtagtggagtcggatacctaaatattaataaataagtgaaaatttaattatacaagaatcacgtgtaattgtgaaatccgaaagagagaagactacgtacagtcttggaagtgaaggaaatgaaggaaatgaagaaaatgtgggaaaaagcggaagaagcgaagaaggaaaaaattttcggatttagcatgcactaaaactaattttttagcaatcaaagtttaatttgctattatcttgctgtgttttaagattatcaagtgtttatcttgtagtataagagtatatagacacaactgttgttgaagtaaagttatagagttatagagttatatacactcatgtctgctatgatgataatatctataagaacattctccatgtagatagtttaatcaccgagagagtatagataaatcctaatcctaaactctagataaaataagtcacctcacttagatacttgaatcaattattttctattgtctttgaattatgtcttcaagtgttttattatcattactattatagtgactatacaattatcacgacaatcgtattatcatttcattcattttttattgtcttttaaaaattaccttttcaacattatctgcatcaaattgtctctttcttctattattcttatattatatagtgcttttcctccctgatatctttttctattttcctattttacttttcttctatttttctcttaaaattctctattttatctttcttcctgtgatcaaaaaaaaaaaagctttcttcaaataaatacatttttttataagcatatacccttatcttataatataacaatactaaaaagaaaacaattaaaacaatataacatagtacaaacaagatccaatgcattttacagtcttggtttcattattactctcatcatttatctcagcttcagctgtaccaataagtaaagagtttatggatcataataatagtaacagtggtgttactaataataatattaataataataataataatggtgataaaattttaaaatttccaattcaaattaataataatccagaatttgttcaaatgttgagaaagagagatggtaaaattatttcagctgatactgatattcatcaaattttattaactttcccaataaatattgctaatcaacaagttaatgttgttgttgatacaggttcacgttcaacttggtttgcaaaggataatataaataatttatgtgatttaaattcttgtattttaaataataatcttaatgaattagaaatttctaataatgattatggtatttattatacaggtaattttggtgcaagtggtaaatggtcaacaggtgaattatcaattaataattctgataaagttaattttaaatttggtttagcaaattcaattgatggttcaagtggtggttattcttggtcaggttttagttatgatattgattcatcattatcaacattagatgaaagtcatttaattgatgcacttaaattaggtaatgtaattgataaaagaattttcgaaattcaatataataaaatagatgattggacaaatgatataatgggtcaaggtgaattaacaattggtggttatgatgaaataaataaaaattataaatttttcgatatggttgataatgttaatatttatatgggtattaaaatgaattcattgaaaaattcaaataataaatcaattgattttgaaaataataaaatgattgtatttgattcaggttcaacttcattatcattaaaacaaaaatatattgattcaattttatcagatattaaatatgatccagattatccaggtttctttgattgttcaagttatcaagattataaaattacattccaaattgatgataattctaaaattgaattaccattatcatcattatcttggaatagttatcaagaagattatgatctttgtcaattaatgattggtacaattgatgataattcagaaatggaagcagttttaggtcaatatgcaatgaaaaattttaatacagttttcaatattgatgataaaaaaattggtttatcaagtagtgatacaattatcttttcttagtttactttgattttattgcttaaacttttattttaatttactgtactttaagttactttcctaatttactttacttcactttattttactttacttcaattcaatatgtataacattacttcaatgttttattacaattcttcaatttaatttcaattttaatacctgaatgagagtactaataaaattaaactagattatattacatgtacttggcattatcgctcttaccgaatttccttctttattattcattactgcatgtatactttttatttttataacctattattaatagagaaaacttagaactttaatttaattttaatttaactaatagaaggaatagaggcttggaaacaaggtttgttaattccttccacaaactgataaaaagaaatcaaaaaagaagctttcaaatacattgctatataagaattgctgaaaggtaatatttttccttacgattaattttttaacggtcatatttatcaagtggatgcccataaatatttaaaaattttttattaatacctgtaaatatgttaccactatcactcatttcactctaattaatacttcgtgccctattggtctttgaaaaaccttaatagcaacaacgaactatttgaccccttttgaatgatcataatcatcgaattaattgataaaataaataaaacctataatctatcgacgatcagttattaagtataattcttgtaaaaatttatgaggtaatgcctattgcatattatcagcaaaattgcttgctattagctcatcatcactcagaggattaaaccgtatacttgagcctcgggccatggcctaactgagtaactccgatggtcgatggaccagattaacgatggtcgaaggtccaccatttttgtataattgcttgtcgagtattgacgagtatattattcgttgaatagttctttcatattcttatagtttgttatttgaaggtttgtattatattcaatatccgtaagtagctcttattctaacagattaagagtgaaaaggcttttttcaattaaccaggtagtatgagtgaaggaactaattataatcaacataatgaagtaaagtatgcaagaatattagggatgcaatctgattcgttgaaagataagtacgaagagtttgagtacgatcctaaccaatatcaagaagttccaaagtatcacagaaggttggatactagacgatggttggaaagtttaaaaatacatttaagaggagtaggtcgtcacgaaccatattttaacattgtcagaagcttattaaacatcagtgatggaaatgagttaataagtaatgatatttatggcttagatcatcaattgataactaatatgttgggtgatgttgttacagatcctatagaacgtcgactaagagtatggatggtgaaaaatacattgcagaagattgcatatagttttggtttcgatgaactggctggaagaagtttacagaaattgtaaagatcacgatgatgtgaaaaagttgatggatatgcaagtgtattatgatgaggaagatggggttatgaatcttgattttgtttatcaatggtatatagttaacagatttcaaataggaagtgaaccaaatcatcaaaaattagttaaatttgatagattgataagtggagaggtagctgaagagtattataaaaaagaaggtgtaacaccagattcatttaaacatgttatgggtgaatattttggacaatttaaagagctcatggaggatgaatatgtaagagaagcgtgtatcttaaagttatcaggagctatcgcattacagaatatggatgaagttgcaacgaaaagaatataataggaagatttctaaagaggcaaataaaattattaatgaaaaaagaatggctgatctggatggtttatggaaataactaaagttgaaaaagtttttgggtattaaaagtgcaagaggtaatggaaaaagatatgaagactgtaacagaaggaaggaatatttcaaagtattcgtatgttaggataaaacttcattgatttttagatggttaattccaaataatgttcctgtttggtatttatttatgatctgccattgataaaaaaacgaatagaaaaaacataatctagagatgataaagtaaaattatatataactcttaactgaaactcattacaagatagctgtaactcgacgagtatatctaaaaggtttgcgtgtaacttactgtataaataagtctttataaaatcataaaacaagctttacgaacttcaatcagttgtaagggtcaccccttaacgttgcgaactaacttattaattattcttattacaacaaatctgatgtcgtggatgatatatttttgtttttaaagtaccttaataatgctcaatgttgttaaaactttatatataggtgtttggtacatgtattattgcttagagcaactcattgctgttgttgaaggtagaaaaattggaaaaaaagttatggataatgatttattttaatatattttcattcattttttcaggttttgagtcaaaagttataaaaatttaaaaaatctctagaacacaactttggaacacactaaatgtattataaaagtgaacgattaaacaatatacaattacatataagtatgaataatttattacatactaaataggaaagaacgaacatctatacatcaaacaggaaattgaaatttagcatatcatcattattgatgattaataatataaaataatcagcaatcaaattttaaacaaaattagtttattcaaaatttaacacctaatttcttgattttgaagctctattacgttttgatgaagatttagataatccttcatattcaggaactggctttgctaaaccaccaggagtattttcatcaaattcaatattctttgattgcaaatctttgattaatttttctttctgtaatgacctccatctagttatttttgcataatcatgaatttgaaatccaaatatttttggagtgaaaatatcagtactatgaacaggtacaagttcagggaatgtttgtaaaaacattgccgggaatgaagtaccaaaaaatgcaccatcaattgctgcatgtctggttgatttgggattataaatatcttcacaatttggacaatataatttaacactttcaactcttggtgtatcacttaatccaattggtaataatggagttaacttacaataaactcttggacaaaatccaaaatctccattcctatatttttcaagcattttatttaatcctctaattgtaataataaatctagcatgaattaatgcatataaaaattttgcattatcctctaatgttcttttaacttcctctggttgatcttcatttacttgttgacgatcacttattatatctactaatgtaccaactctatcaacatattgattcaatcctgtcaaattaaatctatcagttatatattcaacatcaacatcacaaaaatattcattacccttgttacctaaaaaccaatcaatccaatattcagaatactcactctctgaatccgacacatagttttgtgaagccatttcttatttatattgtatgtttatttatataaatcttttactgaatagactaagataaacaaattctagtcaacattaaattaaaatcaatccatcaataaaattaacatgatcgttgccaataaattccaattttcatgatgccaggaaatcggccttttttcaacaaaacgcgagcaacccattggcttttttgatcaaactccccccccccccccagtgcaagcacagagagaaagagattacagttgatttacatatcaattctttaagatacttttagtggaacaaactagtctacagtggaattatacataatatgtactttcataattgtttactacctccacaatcttcattgtttgtgactgtcaatgcaacaaatcagtatattgcaaccgctaatatagatggaaatatttctattagatcattagattccataaataatttatatgattcagttggttcagtaccaattaaaataaatgatacaacaataacttcaaacgatgttacaaaggcaatttataatgttaatccaacacctgaaattgataatgaaaagatattgaactcacaaaaaattttacatacagttgcagttaggagtaggagtaaaattactgcattaagatatgcaaatttatcaacaaatgcaaatttacttgctgcaatttataaaaatggtgaagtttatataataacaaaccctcaagatccaataaaatgtcgaatacaacaaattttcaaacatgttaatggtttattattagatttttcttggtcagccgatgatcaattaatgtcatttgcctcaatgaataatgaagttattatttatgatgttatttatggtaaacaaattgctaatattcatcctcatactaatacaattgttaaaaatgttaaagatggaacatccgaggaattaacaactcctattaaaggtattatgtttgataaaacttcaaaccaatgtttatatactttgggtgatgataaagttttgaatgttattaaatataaagttgttaacgatcatatcttaggtagaatttttgattataccatcactaatgaatttaatgatgttttttcaagttctaaattacataaagcttcacttaaaaaaatttcaactacttctgacgatagattaatttcaattccaaatacatctaagagtaaaagtttaaaaatttcattattatcaaaaaatgatgaaaatatatggtcaaaatcaaacacagtatttacagcatttggattgaaatgtttctcaactgctttttccccatgtatttataaaaattctaagaatgaattagtttatatattagcaacttcatcgccagattgtggtatatctatttggagaactgattcaacaatacctttatatatctcactttgaatttacatcaccatcagttttagatatttgttggagtattgatggaactaaaatcttcttcactagatcgaatggtagtatgcttgttgcagttttcaacaagggtgaatttggtgatcctgtttataaagatacagaactgtcatctgaactacttaagaaaactaaagaacttttaccggttgagtttgcaaaaatgacagaatggagaaaatttattaaagatcatcctagtcttgtagaacaaaaggaagaagaatataaacaaaatgaattgaaaaagatgaagttcaaaagaatagaaattaaacctgctgagagaaaagaagactctagcaccccagctgcaaacaacacaacgatgattacaataactgctaataatgattccaattcagacataaaaaaattaactaaagatgataaagttttaaacgacgtcaaaaaattaccattactggctccaagttctaataaagaggaaaacactaaaccttcagatgaaagtaaagataaagcggttgaaagtacgcaaaaatcaaaggatagcaaagagaaagaaaataaaaccagcacacaaaagacaggagctgcagataaagtaaagagcgaaaaggataaaaaggataacaataatagtacctgttggcgataaaaataaagacaaggaaaaagaaaaagaaaagactaaagagaaggaaaaagataagggaaataataaacaaaagaaacaagacaaagatatatcagatagtaatggtaccaccacgaacggatcatctgagaaacaaaacggaaaacaaaagtgataaacctgaagtcaatcccaaaaagagagcattgccaacctctaattatgattccaccttcaaactgtgtttccaaggatttgaacaacaaagcatcaaaaatgatgaagaaagactcctcaaatgaaaacacaccagccaataaaaagaaaaaagaaaccgagtctgttgagtttgtcggttcaatcataatcaatccacaactatcatttagcaatatgcgtattgcaactccaagattaagaaacaacattttatttaaatttccagatgatgaaacactaatattgaacattaaaaatggtaacgggttggaatcgaatcctactaaagttacactttttaaacaaactgtttcaaatgaaaataagcaaacttttgttgactttataccacataagattcacactgcttgtggatctacgaagtttttagcaatttctacaatcgatggccaaataataacatattctgaatcaggtagacgtatattacctccaatagttttaggtaatccattatcatttttggaaatgaaaggcaaatatttattagctgttacttgtacaggtgaattatttgtttgggatttagttttgaagaaatctgtatttaaaccaatctcattatacccattattacaaccactttattcatcaggtcaaatattatcaaccaatatgagcttaaactccactttagatggtaatcaaaataatcaaaattcaaatataaatatcgaggctaacggtttaatatttgttaatggtgagttattaacgaaaagtgaaaatttaacagtttgttcaatcacggaacaaggtatacctgttgttactttaaccaatggtaatggttatttgttcaataaagatatgaatacttggtcattaatcagtgattcatggtgggcatttggttcacaatatgcagatagttccttatcagttgatacattaaaagatttcggattattagaatatatggaatcacaaacaaatgatcaaataaatagaagaggtaaagctaaattctttactaaaatttcaaagatgatgttaatgaaggaaggttatgaaagtttggaaaccgttatttcattgaatcatttagaaaacaaaatttatttttatatgttgttgaatgattatattaattataagagatttttaattacttataccaagagattaagtgaattgaatctaaagaatagattattagaagtattcaatggtttgtttattgatttagatggggaaatttgtggttactcaaaaaagaaacttttagaggaattaatcttaagttgttccaaacatagagaagttcaacatattcttgtacaatatagtgaatctattggtttgttaacaagggatgatgattcagatatagatatagtgtaaaatttattgttaatgtataaatatatttataagagtttttgtttactatttacatgtacattaattagaataacttgacataccaacaagtttcataacatctttaagtgttttattcgcaacatttctggccttatcggtacctatatcacttaacttttgtagatattctggattactgatcaattcattatatttcctagcaggttcttctaattctttaatgactgcttcagcaactagtccctttaattccttctttgttaaatcttctacttgtttagtaacattctctatattatcgttcttagttgctgctaaaatactgattaagtttgacacacctggtctagttctccaatcaaatgttaattttccatcgatggaatctgtagttgctttattgaacttctttataatttcctcttttgagtcagttatgaaaatcttggataatggttccttatcacttttactcattttcttcaatggatttttcagacttagaatcttctttgttggtgttaataaggtatgtggtaatctaaaataatctttaccaacagttttattaaaattttgagcaatttctcttgttaattccatatgcttgactttgatcttgtccaacagggacgtgtgatgcgttaaaagctagcacgtcagctgccattagaactggatatccaaataatcctaatttaaccttaccaagtgcattatcatcattgacagatgcagaatcttttaaattagcctttgatttccattgcgtcattctattcaaataacccatccctgtaaagcatgacaatacccattgtattgatgtaatttcaggaattgatgattgataatagacagttgataaatttggatcaattccacaagcaataattgaagcaaaagcctctaatctttgatcatttaaaactttataatcttgtggaacagtaagtgaatgtaaatctgcaacaaagaaatataattgtgatgaatctgagttattactgtcgttaacaaatgtatttaaatcatgccatgattttattgcaccgaaataattacctaaatggaaagtaccagttggttgcactccacttaaaatagttgaattcctaggtaaattaaaagctggatcagttatcgatacagtatgaactgttccagaaagtgaagagtaatttcgtatacaacgtttaagtgggaacatcgtttgcgtacgatagaatgatgtacagtaagtaaactagtaactctgagtcaatttgagtttgcaaataatttcaacttgaatttttcatgaaggcttctgtacttttttgtctttacagttgcaactaacaacccacatgccacctatcgaggatttctttgcatttggaggcactgattttgcatctccacaacctggaagctacaccaagtaaaaaaaagaggaaagttaagaagaaaactaaacctaaatcagaagttacctctacaacgttatcatcaaagaccgaacataatgtacaaactttaccgcaaacaccatcatcacatgaagcagtcgaagatccaaagctagccacagaggtgaatacttctgctattgctgatttgcttggtctttcatcatctgtacctatattaaatgaaccccaaccagaaaacagtataaatgatcgacatgaacgactaaaaaaccgtacaggcaacacaaataataataataatatggcagacactaaaatcaacgatgaagataattttctttcatctattgatgattttgtcaatactataaaggaaaagggaacagaaatccaaagtttaatagaaacataccaacaatcaacagttgaaataaatggtgaaaagattcctgctaaatcagttgtttttgaacttcatttggatattcatgcagctggccaagtgtctggtccgtatgatatgcaagttaagggatcaactaaaataagtaagattataaataaaattatgggattgtttaataacgttgcctcccccacttttcctgaaactgaatggaacgaattagcattatacgttagtgatataaatgttgtgttcaaccaatcattacgatgtacatcattattaacttaccaaggacagttgagtaaatctgatattgttaaaggatttaatgttcatgggattattacaactgatgaaaatgcacgattgttatacgctaatgaaagggcaaagaaaatgagtgcagtgaaaacagaagatgaagaagaagaagataatgagaatgggttatataatgttgaaatcgaagatacgatacgtggcggaacaaacagtgtttcggtcgtttcaaatatgtcagtctctgaattattatttatgtataaatataaaatgaaattaccaagtgaattggatttaaaagttcaaaaagaagataaatttttaaatgttgatgaatcattgaaaattaatgaagttgtaaaaaatacagtgttgaaagtaacttactctcttgaggaattgagtaagctagaagaggaaatgaaaagcaaggcagctaatgagggagaggacgatgaagatgatgacgatgacgaagatatcgatgttgcaactaaaggaaatgaagtacaggaaattggtagtggaggaaataacgaagagtattttacaattttcattgcaggtaaggataaaaaacgatataaagttagagttaaaccaagtacaaagatcagtgaaatcagcacgttttataaaaacaaagctggaattacagaaaatacatcattaaaattactttttgatgatgaagaaatggatatggacggtgtagttgcagatacagaattagaggaagattttatgatcgatgttattgtttaaaattacaaaaccatgtaagattatgtacaagttgtttttatatataaatgctatcctattgaagtcttttaatattagataaatcccaccctttttccttcaaataaccgccaattggtccattatccttcatttgaagattattcaaatcaggtttaccagaaacatcagtaatgtaacgttcaggaccacaaatgaaagcaaatgaggaaagtggagttgacggatttgattgttttttgaagaatgtccattgttgataagcattatcagctcttatctttgaagttgaaggacgtattactgtctcagaatcgactctttcaccagatgatgaatcaataataactaaaggtttttcagtttcctttggttcttctaattttgaaccatttatttgattttgaacttcaagtttcttttcacgtaaaagtttttgtttgaaaacttcttcactaatatgtagatccataccacctgtaaaatttggtaatgtcggaggatttacattatctattgataagcgttcatttttagactgattgcaagtaatgaaatttaactctaccacaattttcagcaaagaagttaagagttttcaattgaggtaataattcagattcatccttaagagaataaaatacatcaataaatccctttggtggatttggtgaatataaaagttgaaataatggcaaaatacctgtacctgcaccataaaatgtataattttcaggttttggtaaattttcaggccattgtggatcaggttttatagttgataaagtatttgacatttgtggacgatcatcaattctattaagtggatgatatgggaatttataatcaataattggacctctaattttaacttcatctagaatatttttatttgttagccatttagaaaattcaccatcattataacgtttcacaattagaatgaatttaccttcctcttctaattctttgactagacgaagatgaggttccttagttgttggatcaatacctgcgacatacattggtaatggagtataatttctaacaatatttatatcaggttgcattacttcaatgcatccagagtttatcaccattaaataattgttcattatgaattaatttttcagctctattctttctagttaattcaattaaataatgatcagtcattaattttatacttaaatgatattatataaggtaaaaatttatcaattttcaataatgcagtatcatcatcaacatctggatcatttgtattggttatatatttatatgtaaacattgcccaacaaatacctgtacatatgattaaagaaggtaataattttctaaattttgattttggtttaatacgttcattcaagttgatctttatataattgttttggagttttaggtgcattaaattcaaattttgtatctttagtattaagtagagggattataaatagttttatcttttgttaataacgcctttaaggatggatccattgcaggtaatgaagctgaaggttttgaaacttttgatgaaatatcaggattaaaatgcttcatttaatgtattaatatcagctgaattatttgtagtttccgttatttttggtatttttgaattatttttcccatttgatggaggtgttggaggagtgggaagattagaattccaacgtttgaataggatatgagacctacgtatcatgtaatggggtttagtacatgtcgattgatggttgactaagagctgtcttctaaagtagtgaaaaatctgagaaatctggaaaagttgaaatttcgtttatcatggacgttttgagtaatcgatactgtaatctctttcttttcctttagtttatatattatacatatcatatagggataatgttattagagaagattggtagcgtgcaagcacacgcagagagagtctgggacttatctactcatagtgggattccattattagctagttgttcaagtgataaaacttgtaaattatttgatattagtaatgggattaaagaagttagtaaattagatgaggaaacacatagtaaaagtattcagaagtgttcaatttaaatatagtaaagatactacatatcctacgttagcattaggtagttttgattctacaagttcaatttggggagcagatgattttaagagtaaatgggaattattagcagttgttgaaggacatgagaatgaagttaaatgtgttgattggtcaattgatggtaaatttttaagtacgtgtgcacgtgataagagtatttggatttgggaaaccgatgagttaaatgaagaatttgaatgtgttgcagttttaagtgaacatgaaggagatgttaaatttgttaattggaatgataaaggattaaatgatgatcatacatttataagtggatcatatgatgatacattacgagtgtggcgtcaatgatagttatgatgaagatgaatggaattgtgttgcaaatttatcaatggatagtacagtttggagtgcaacatggattaataataatacaattttatgtggattagatgatggtagagtaattcaatgtattagaaaagttgataataataaagatggagttgaaactgatagagataatttaccaagtacagttaaagatgttgaagattggattattgataaagtttggtcaaaacatgaaggtagtgtatatagcgtatcatgtaaggatgatacagttgtcagtggaggatccgatggagttattagagtttacaatttaaacggtgatatattagcagagaagagactggcccatggtacctctgaggttaacgttgtagcagttatgaaaacaggtgtagtagccagtggtggtgatgatggagtaggttgctctagtggaaggtatatagtgttgtatagtagacattacgtaattattaaaagatataatctttttatcaaaattttcacttcttagccttttaaggtaaagtaaggtttattagagttataataataatatatagggggtagtaagtatgttaaagaagggaattagcgttgcaagtaaggtagttaagcctagtgttaataaaagtgtgaaattaagtgcagcagagataatagctaaggcacatagtggaccaacatatgcatgtaagagaccaattgtatggattgattgtgaaatgacaggtttagatcatcataatgataccatattagaaatttgttgtcttgtaacagatgagaaacttaaagtgttagatgaaggatatgaaggtgttgtacatcatgaacaaagtcaattagatgcaatgaatgaatggtgtattattcatcatggtcaaagtggtgtatcggctagagcaagggaagcaactactacaaaggaagatgttgaaagagaattattaacatatttacaaaaacatatgcctaaaggtgttggtatacttgcaggtaacagtgttcatatggatagattatttatgttaaaagatttccccaaagttgttgaatatcttacatacaggataattgatgttagtagtgttatggaggcagcacgtcgtttctgtccaagtattttagaggatcaacctaaaaagaagggtgcacatacagcgaaggaggatataatggattctattgcacagatggcctatttcaaggatacattgttcacaatcccaatcaaagatacaaataaagataaagaaacagtcgatgattcatcatcaccataatcatccaatgcttaagtaataaaaagcgaaagaaagagtcggatgatatcgatttgaacttctcacagtgttaaaaaaacttaattatgccatcaatttaaataaagtgtgtaaataggaactctcttttaatttaattattgttgtattatgaaatgaaattgaatgtatttttctttatttccgattagtaatatttctcttttatttattatttacacacttcatatatataccatataccacctgtaacaacaatgaataatcaaccattctcttttgagaactttcatcttgacccgcaggattttcaaaactttttacttattaatcccccactaactgaatattctaatcgttatatggctcaacgtggtgttgaccaatttttagatgataatatgttaatggaaaataataatgtgatgatgcaaccatcacatcaacaacatttacaaccacatcaacaacaacaactaccaccaatagcacaacaacaagctcaacaagcacaacaaccaatgtcattacaatcttcagcttcaatatcagcttctactcatcataatcaatatcctaacaataataataataaccaaccttattattctattccattaaatcattatactgatagtaatgattcaattttaccttcaagaagattatcaatttcaaatggtcaaattggtcaaattagtatgatggttcatcaaaattatgaaaatgataatgactttgataattcaacagtttcctcaaatgatttacaatttaaggaaaggaaaggttcaggtccagattctgcacctgcaagtggttcagtagattttatttcaaatcaaactcaaaataatggaactactaaaattaaaacagcgcaacccgatgtaacattagcaacagtaaaagagccaataacaacaacagcaacagcaacaacaacaacaacaacaacaaaggcacaattaccaacagaagttccaataaatggacaattgccaactgcaccatcatcagcaatttcaacaaaaccaggtcaagtatcatctggtgcttttgaaactgatcaaaatggtgttccaacaagaaaattagtctataataatgaagttatatttaatccaaatgaaccaatacctggtacaaatgcatggaaacgaaataaaatacttgaaagaaatagaattgcagcaagtaaatgtcgtgcaaagaagaaaaatatgcaaaaacaattacaagatcgtgttgatacattaaattttgaaaataataaattaaaggaaatgctttatgacatacgtacaagattaattaaatatggagctgaaagtaatgttaattttttaactttattaccacaagatcctgaacctgatgatgaagaaattgatgaaaatgatgatcaaaataataataatgatgacaataataataataataatggaggtgatgaattgaaaaatcaaattgatcaagatcgtaaaaataatgatagagtagagaaattacttgaacgtcgtcgtgtatttgaaaagaaaaagattgttaataaacgtgttgatgcatttataaagtccggtgtgttgtaatcgaaagactttctttatgctgtgtaatatcatttttataaaattcacatattaagtaagcgataataatattaatgatatataatatatataaagccacaaataataatacacttctctcttctatacatcaacaaaatatgtcaggtatatcgttagatgatttagattggaagaaggaatgtgaaaatattggtagagagttacttaaaataacaactaatataaggaatggtacatatagtgatattgatatttcagatataaagaaaaggatagataatcttgaaggtggcgatgaatcaaggaatgcaattgtaaataaattaagaaatgcattagatgagatagaagatacccaaaataaacaaaatacccctaaaataattgaaaataataattatatagatgaatatgaagcagaaagtgaagaaggagtacaaccattagaatcaccacatcaatttcaagttcatcaagatttaattaatgaagatattgaacaacaacattgggaagcagttgaaagagaagctgaaattgctagaattacaaatactgttagtgatattaatgatatatttcatgatatggatacattagttaatcaacaaggtgaattaattgataatattgaagataatatttataggacagttgattttacaaaacaagcaaatactcaattattaaaagctgaaagatatcaaagaaggaaaagtagatgtacatgtattttaacaattattgcagctgtatttataatgattttaattttattaattttataaaaataaatattggtagttaaggaagagttttatgaataagataagaatttagaatttagattttagaattagatttttttaccaaaataaacccattgatcctttaatggttcttcctcaagtggttcccaagctttccattcagccatttttttagctaattctaattcttcatgagcttgaattacaacttcttcaattaaaccacaacctatttgattttcaattttttcaataacttcattattttcaacaatttttaatcttgaatttgttaaattttctacacttgttctataaactgattcatttgggaatttttcctttaataaatctaatgttgcattatataatgaaattaatgcaggtcttggatttggatgagtttgtaaacctgtaataccagttggattacccttacctgaacgtacaagaacaggagttgcagcagaagttgcttgtcttaaaagtgaagtaaatctcattataatatccttattaaatgaaataactaaagatcaaaaccttggattactctacacaatttctcattggtgtgtaaatttaatattattttagaagtatacaattttcatgaagaggggaaatttacttagagagtacgtcgatcgtcctgtatccatttggacgatcgacgcgggtcttaatataaatcatctaataaccttacacactcattaagtgcacaactgactgataatataccctgtctagtaatatctgcaactattggtgcctgatatacactactaccaactataaaataatcttgtaatatttcaacatcatcaacaactccaaatcctggtccaccatttaaaaattcattaattgtcatattttcaataggatttttattaaatgcctttgatccatcaccattcctcatttgacgtcgtataatccataaatcaggttctttaaccatatataaaacatattcaatacctcgtaatttacgtaattcagaatcaaatgttggtataatcattaatgtaccattaaattgtctttgcattttcaaaatttgattattacattgtctatcccaaaatggtgattgtgaaaaatattcaagtacattatctgttcttaatccattaatattgatccattccggtgatctccattcaacttcatctaatgctgccatgtgtatatagtctgtgttgttactgtaaagagaagaaagacactatcttaaattttacgtaagccaatcttgatttttcatgtaatttttcaacatcatgttaatttgaaagaaagaggtttaaagtaagaatacttccattatttcatattccctttagacaacaatcatataatgttcagagcctattctactaaagtatccaaggctattcctaaaccttcaaatgaaattactgatgtttcagcttttttaaaatctattggacgtaactgtgttgaatatgttgaagcattcccaacttgggatgcattatttacttcatcaggtagagaaatgaaagctgcaggtattgatacaacaaagagaaaatatattttacatcaagttgaagtttatcgtcaatctggtaatgtttcaccaactcctttaagtaggaaaattaatggtggtgaaagaaaattaaatcaacatttagcaaagaagagagtgcttgaaagaattcaattagcaaaagatttaaaagcttttagaaaacaacaaaatgctacaacttctctttacaataaatttgaaaaacttcatgaaaatgaaactttataaactaataaattaaacattttaaataaattattataatttcatgtaaatataacatatacatttttaaatattaaatataaaatcattaaaacaaaaactttccaaaatgtaaaacattttaatcaccaaccctattctttaattatctcatctgataaccattttgcttcattttccataacttccattgtacgttcatgtcttttactatcatcagtttccattggttcacaaacctccttccaccaattattcatattttttaacatataaccttcactctcttgtaataaattataaattccatctccatatccatcctttaaatatcttggtattatatgacaatgtaaatgtggtacactttgacctgctgcaattccatcttgaattgcaatattaagtgaatcacatgaatatatcttctctattttactacttataaatttaactgtttgaaagaaatcattagtttcctctatagttagttctgataatcttggtactttacgtaatgggacaattaatatatgacctggtactattggctttaaattaactaatgcataactatattgagttttatagaaaacttgttttgaaacattaaatgtactgaaaaaaattgtcattgttatggttcatatgacatgtcataaaagtttaatatgaaaagttgaaaagttagaaagttggaaagaaattgcatgtctttacatgagattgaaaattataacgtaaatagaaacctcacctaaagtaaatttaatggcaaaacattaacatggctttattattttaagttaatatttatctctctaaataccaactctttcgcattcattgaaggtgagtatgactcattacgacacactcggaataccgagtactgcatctgatgcagaaatcaaaaaagcttatagaaaattagctttaaaattacatcctgataagaataattcaaaacaggcagaggaacaatttaagttagttaatgacgcgtataatgtattaagtgattcaaataagagaaatgaatatgacgcatcattgaataataatagatacaattcaaaaaattattcaaatttcaatagttatagtaattatactaattttaatgattttagtgctgatgatttattcagcagatttggtaatatgtttaatgattcaagtccaagatttcactcaaatactagaaatggacatttttctcagagacaaaattatgattatacaagacaacattattctgaaaatcgtcgacaacgtgataatgaacaaaagcaaaaacaagaagaaaagaaaagagaagaagaaatcgctaagcagaaagcggaagaagagatagaaaataagaaaagacaagaacaagaacttcgtcgacgccttgagatacgggataagaaaataaaactagccagagaaagagaagctgaattagcacgtaaacgtgcaatggaaattgaagaaaatgcaaggaggaaattggaagaagaaaatagtaaaaacaacaacaataataataacattaataacaatactactaaaagtagatttggttttagagatgaaagagaagcaaaagcagattttgatgatttagaggatagtttagaaggtgatgatagctttttacataatgcaacttatatgggtagatggatgcaagaacagaatgattttgaaagtttggaacctgaaaatcatgaatctatacctgatgttgatgaaattcctgatatttcagttgaagatagtaatggtttaaatggtaatatggagaataatcaaaataaacgagccacatgggcagatgcaggtggatttggtgttaataatgagtttcagaatgatgctcatattgatgttgatcttgatgctggtgcgtatgccgatgctgaagatgatggaagtaataataataatgttaataatgatagaagctcagacggaagttcagatgaaagttcagattctcaatcaaatgatgaaagtgatgatgatgagagagatataagtcatattgacgaggaacattcactatataatgatggtaccaaggatgatcctatagttatcgatatagccgatgaagatccaaattcaccaccattaacatcaccatctccaagacctggttcaccagagaaaagacgtgcatcttttgacaaacgtgggttattcagagacgatcgtcaaagattcaaaagaccaaaacaagtaactaacagtgataatttaggatcacaggatatactttgggaaacttatatgcaattacagaatgccttagatggtcttcaacatggtattaatgtgctaccaacaacggttttaccattatttttaaaatacgagacacaatttttgcattttttgcaaaactcacaaccagttccctggggacagtatgcagaagtggcacaatggcgactcgcagctgctcaacaatggggtaactatctctagaatagataatatgtagataatatatatgtcgtatttagtgtacttaacgtgtaatagaatatagtaatgcttacataatacaatatccaaattttcttaacttaacagtggaacaagagtactgtatattcatcaactattactactgtacctcttcttctactgaacaatggactctaatacccctactacgtctcgagatgtcagactcttgcgtctactctttgcagcacagggagtcactgcatatgaggatcacgtcccattacaattaatggattttgcatatcgttatacttcacaaattttacaagatgcaacagtgtataatgattacgctgcaccaaatggtaatgaaaattcaaatgataatgataacaataataataatggaaatgatgatgatgatgcaactggatcatctactttaactaacgaagatatacgattagctattgctgctcgcacaagttatcaatttaaaccaataccaccaaagaaaatgttacttgaattagctgctgaacgtaatgaaaaaccattacctgctgtcatgccaatgtggggacttagacttcctcctgagaagtattgtcttactgatgaacctcttaaaaagaagaaaaaagtgtaatgtgtaatatatagtgtttataaataagaattggttttttaaagtgtgtttatgagatagtgtagtatttactagatacggatatacaataaagtgttttaagaaaggtataaaatccatgtgtcatgttgtaaagatataggttatttgtataagccaccaaactttcaatatcttgaaattatatttttcgaatgtttataattctcaacccgacacaacccttatatacttattttctcttcaatctttcaacaaacaatgtcaatggtcacacagatgtccattcccgaagtcttagacagggaaattgaaggtgcaatcaatgatagaactgcagttttatcacaaatcaatgatttaggtccacctgatcttgtcactttaacgaaaatcattggtactcccactaaatcatcaacacctcaatcacttcagacaacaaatacttatttttactatactggtgttgatacttcaagtgttgcaacaattgcagcactactcaattcattgaataatattatttcagagaaacctcaaatgtggtttggtaaacaaaaggcatttcatgtatctcacgcctcgtattcaacttataatgcatttagaagattagatatgcgtgttcacgttgcatttccaggttcagttagttggaaagttactgatggtcttgaaaataccgctgattctagtataattaatgaagaagatgcaaacgaaatgtgggaagaaactttcatgtcatcaatggttcgtactttagttacttcaaataatgatgatgaagactttgcttcaattgttgaattaagaagaattaatccatttctagattcaaaatattcaattcctctctttttatcagcttttaaaaacttatacacaaagggggaatatttaggttgtaatgaagattcacaaaatcctacaagaactaataactatatggttgatgcatttttccaaatgattgaactgactcaatgttatgaggaagcattggatgttttaaatgaactgtatgcaacacatcctgaaattgctcctcttgttgccaaattattatttgtttcaaatagggaattagatgcagttaaatttattcataaaacattatcatccgctaaagatgttactgaaatcccaggatcttctaatttacttctcttacaatcagaatactgccttgaaaaatcaagacccgatttagctttgcctctggcaattaaatctgttgaaacttcaccttctctatttgcaccatgggaaaatctcgttaaagtttatattgcgctgaataaatttgaagatgctttgttaactcttaatgcatgcccaatggttactcataaggataaatatgtactcaagagaattgctattggatctgcagcaaaattgaagaatgataccaatgaatcaatctacacatctcaagctccatcacctaacgatttacatttaccattaccgcaagatgtgtttttaagtggtgttactgatctcagctctcaagaagtcgcagctgaacatgcacaattattaaagagtaaaaatgactcaacttcagatgctttaactcctcataaattaatgactttacctgcctcaagtttgaaatctactttccgtaaggcatatagtctattatcagaaattgtacacaaaattggttgggaaggtatgcttaaccatcgtgctaaagtttttgttatggaagaagaatactcaggtaatccatcgcaagaagaggtcccacaagcccatccatctaatgaattccgtcaaaagagactatgtgaaagatggcttgataacttatttatgctgctttatgaagatatgaaagcgtacacatatttccgcacacaagaaatgcaagctgaatcaatgtcagataatattgaagtcaataataataatgataatggttataacaaacactcaactttatccgattatttaggattatggggtaataacaatattaagaaggaagaatcagttcaccaaattaataatggtgaaggtaaaatgaatttagatccatacactcaaacaaaaacttgtctagaatgggaaatgattggtctagtaagtgaaaggttaggtcatataagagatgcacagagatgttatgaacgtgcacttgctcgtagatttagtgttagatcagctaaaagattaattggaatttactctcgttggagaaatcatgttagaaaacaaattggtgtcttgggtaaattaaaccataattcaaacgatagaggattaattggacaatctaaatggaatgcttcaatgattagtttacataataatcaaagtcaagccaatagaactattaaagatccagcaaaatatgatgctgcactactgagattaattgttggtttattggtatgggattataggtggtactcactattttctccattattactttctacattatctgatgttgttggtgatttaggtgagactaaaacaatcagtgaagttcgtgtttggtttgatgaaagtcacggaaatcgtggtgttgtagatttagtaaacgttgcattacaaacattaaatcgctggggtagaattgaaatggatttataagttcatagtattgtttatgtataccttttgtaatcattaaataaaagcattaactttagatcaccacaatataaagaatcaaagaaagaaaaaaagaaagaaagcaagtctagataattacaattatcaggtatgcacgcatggcatgaatttgttcactgagtgaaaatcaaaatatcgctacgtttccagttttcagcattacaagggacaacatcatcttaacaaacaatggtgtcaataaccaacgcacataatgatttagttcatgatgcagtgctagattactacggtaagaggcttgcaacttgctcatcagataaaactattaagattttttcaattgaaaacgatcaacataaattacaagatacactcacaggtcatgaaggtccagtatggcaagttggttgggcacatccaaaatttggtgttattttagcatcatgttcatacgatggtagagttttgatttggaaagaggaaaatggtcaatggactaatgttgctgaacatcgtgttcatacagcatctattaactccatctcttgggccccagttgaatatggtgcgttgttattatgtacttcaagtgatggtgattgttcaatcattgaattcttatcagatggtagtactaaaagtttcaaattccaagcacatctgattggttcgaatgctggtacttgggcaccatgtattggtgatggtaaagatttcacaaagagaagaatcgttacaggtggttgtgataacttagtaaaaatttggaaatttaatgaagatggtactaatgttgttttagaacatgtattacaaggccatactgattgggttagagatgtcgcatggtctccatctaatttgggtaaagcatatattgcaactgcaagtcaagatagaaccgtacttatatggacaaatgattctaatgattctacaacaccttggaaaaaatctttattaaccaaggataaatttcctgatgtttgttggagagcttcatggtctttaagtggcaatattttagctgttagtggtaatgataaggtttctctttggaaagaatctttaaatggtgaatgggaatcagctggtgaagttgatcaataagtttatttatcaatttttcttttattacaggcttatatagataaataagtaaataaaaaaagtaataatctcttctatttggaattaactagtcaaaattaggattaccaaacatactaattatcattgtaaatctttccttccaggttttaccatcatgatttatttctcgtatacctctaccatcacaaccaataagtgaccatacataagctttcaattcaagtcttaaaattgcaaattttacagctaaatatcccaaattggacctttcaagtgaaagctcataatatctttttgcaaggtttaagtcttgtgcaacaccaattccgaattcataggcccatcctacattataactaccaagatgtgatcctaatgttgatgcatcatagtaatatgaaattgcttttttgacatctctcggtactatagcaatttcattggtatatgtgaaactatttctcagaagtccaatacttctcaaagtcaacttcagcggagatattattttatctatagtttcgaataaactgataagttttggcaataaccaactcttttcttcttcttcaacactggaaagtggaagaacgtactgccaccatggtctattatatagcgggtctgtttggatttgctctgtatatgatggatacaagccattataatataaatctccaagatagttaattgaatctctgttataatgttttgcactaatttcaaggtatgaaatagcttctttaaatctctgagcggtgaaaacagtggaataaatatcatcagaatacctatacttcttagatgcaaatttacctaaagttggccataaaatcacacctaatgattgttgtgcattagcatatccaatttcactagcaattgctaaacttaccaaaccagtccatattttattgtcatcattttcaggttttgaatttataaaggagtagaaaggtaatttgaaatcaaagtataaatgatccagaagtttgacatatgagttatatacaccagatattgacttttcctcagtagtatatcttccctcctcatatagctggattaatttccgtttcgcaagcatattatatggagatgcagtagacagcattgtaatgattttctcaggaattatatcagggttctctgttttcaattgtgtttcaaattcatcaatcaaatgaagtgccttataatatcttggagaagcatatttaattccatcttcatatatttccgagagcttttttcttatcagcttccattccaagtccataatagttgataattccattatcacttaaaaacggtttatttccagccaagttcttgccgatatcaatataatgtttagccaaatcataattaacttctgtaccttcacctcttaagtacatatgaccaaggtattgtgcacatctaccaacaaataaatctaaaggactcaaatcttcaccaaatgaaatctcaaacttgaatccactactgctgtccttaaattcttctttagcttgattaagtttttcaacattttttagtgattgtgcaacatcaggttccaaaagaccgttacttacgcagagattagcaaatttaaatgccatatcataatttctggcgtttagatagtcaccattataatgtttttgggtttcaaagtatagtaaactgtatgcattaagagtttcgtcttcatccgcaacataatcatcatctcccagtgatcctgtacccatttgtttgattttttcataatcatcaaatgtttcaaaatatcttaaagtatctaaagcttgagttgcaggaccaaaaatcccatcttcaaaatcacaccatgatacatcaaatttgttcaaattataactgaatatcatttcttcaactatagtggatggtgttttttgaacatttaacatcgaagagccgattttcccttcaattctttccttaatcaaagagaaatagtatattgcttcagaataattttcaacaacattaacagcaaacatatacttatgtgctaatgtcatttgtgcttgaatgttatttagatcagcagcaaatcgataatgaattaatccctttgctggatctttttcaaaattcccaaatactcctgtagagtatatcacacctaacatgaagtgtgcatggccttcaatttcagcactgacattgggtaattcattaacaattctcaaatatagagcttctgcttgttttacatcaattgcggtgttatagagcccgaaaaggtttatatcagccaatattctagctgcttctgaattgttttcaatttcaattaagttatttagttcatcaatatgttcattaactgttttatttactattgaatggtcaagtttcaacggaccataagggaacttaaaatcaattttaccatataaatctatatcttcataatctaaaaatatcgattcactatctggaatttccagcatatatcctgaattattttcattcttcatcttaggacttgcaagttttgtagtaagggaagtaatcatgaaaaaatgtatctcccttgatttcagcttcatgatggtacctgataatcatactgtacggaatttttaattctatattcttctttcaattgttcaagtacatcgtgtggatctatggatacaactgacttactcagtgccaccgatatcaatagagtattcaaccacttcattggtttaaattaatttgtaaaagaagtaatatataagcttgtgcatgtaacgattaacgaaatctcaaaaattatgtgggggttcaaagtttgccagctcatgagctttttttcaatattttagtttatatatatgccaatggaatgttgttcaatatcaacgatgccaaagtagcatgtgcttgtatgaaatatagtcaatcatgccattctgtaaggtcaatgaaatattgtgaaacttgtaaaacaagaaaatgtttgttttgtacactacaaaatgttaaatcaagtagttgtggtaaatgttcaaaagaatacaattcaggacgagagttattgttcaagatgttatgtttgtccgaatgcaatgctgatttagtgacaagtcagtacttgtataaattaaaggaaggtacgatggatacgtacgagctgattaggaaaagagaagataaagataaatatattggtaaatccgttacattcaaatgtgcatgtggatacaagttctcaacaggtgttggtaagaaagaacagaaactacaggaaatagttatggaagatgtaaagacatgtcaggagagacgatatgatgaacttggttgaatattataaatgggtactgaattatcatagaatagaggataaaaaggctcaaattcgatggaagagtgaaataatggagatgttcagtcattttgaaatatcgaaagtgttgaaaaatgagtatatagatgaactgaataaacgacgggaagaaataataaagagtagagatgactcgattgatgggaaatatccagttccgaaacgattaactaagaagttcagtcagatatgtgtctcttgtttgagtaatgtcagtaatacacctttaagtgaaaagattcctgttgtttatacaatgcctatgattgggtttttcatttgaaaaagtgaaagaatttagataatgaagagacatgtgatgtgcctaatattattatccatactgaacgaaggagattcaggctaaagttgaatgtgaagatattggttttgagctaaatagtaagtcaaaagttatttggaagatatacccacttgtttattatctcaaggtaaaggtaaacgttcgaagagtgtaaactagagctttccaaacgtgatccatcgatattttctaaactcagttatatagaagggtacaactgttaaaataatagaacagggaacgagttggtctactttgctaataaatgttacaattggctacaaacaaaaagaatttgaaatacaactaactttcaatgatgaattcataaactatcgttgtcatttgtaataaataggttaaggattgtaaattaatattatataaagagaatttgaataaattaattatgtttatcttcaggatcaattctaaagactttatcagggttgagtaataataaaggatcaagtgcaaactttatctttctcattaaatcaataggtgtatcacctaattcttctaaaagaaaatctcttttaccaataccgataccgtgctcaccagtaactgtaccatctaattctaaagctttatgaaccatttgttcaacaactttttgaactttttcacgatcttcctttggataaacaataaaagtatggtaattaccatcacctgcatgagatacaatacttgcagttaatttagcatcatcaataactttacgtgcatgttcaagactgtaaactagttttgatattggaactgcaacatcagttgtccaaatttgagtatcaggaccatgtaatagtttacccgcatccagtgttgaccaaagagcaactttacgagcagtccataattcttccttttcctcatctgatgaagcaaatctaaaattagatttaccacaattacattcataacaaatagctctgatatcattagttatttccttaacaacattaggttgaattaccacctaagtttgaacattaaagttggtaattctttatatttattagtaacactaccagaaccattaacgaatttcatcatttcagcatccaataattccattgcattaaattgtaaacctgactgaaccactttagcaactgcttttgctgcatcatcaagagttgggaaacttacaacggcaacattttcaaatttaggtaaaatatttaatttcaaagttgcttcagtgacaatacctaaagtaccttcactaccaataaataagtttgttaaattataaccagcagaagatttctttggtcttctctttgttttaacaattgaaccatcagccataacaactgttaatgaaataacattttctctcattgtaccatatcttgcagcatttgtacctgaacaggaagtaccacacataccaccaatacaagcaccaggacctggatcaggaccgaaaattaaaccttcagtagctaaatattcagctaaatcttcccaaccaacagctggttgaactacaatatctaaatcttccttatgtaatgctataactttattcattcttgataaatcaatacaaattccttgacgtgttggaatataatgaccttcaagggaagtaccaccagtgtaagggacaattggaacatgatgtttatgagctgctttcattataagtgaaacttgaacagttgattccggatataggacagcgtatggacgttcatcatcttttggatgatcagttgaaaagaaactatctgaatgattttgcagttcatcctttgaaactgaaatttgatccgatttaaggtaagcttttaaatcatcaagtactttttgataatcaccataaataggtggtaaagttttatcaagaggtaaagttgaagtgtgtgggaagataaattcaggtggatctttacaaatattaaaagaagcccaagaagtacctgctaagacaccaattgttaaaattgcagctgaatataataaatttgagcctctgctagaggaggacttatcggaagttgctgcagaagttttgattgattgtttagcatcattcttaccaacattttgccagaatttggaagtagagaaagctctacgagcaacacgatgcattgggtcagaagaggatcaaagtgcttggagcggttgaaacatgcacatgatgtggatatagctgagtctttatataaatgatggtgggataatatatcgtaggagttgaattgccgggagtttacgtaatacttaggtagttattaatgggatgggatggatgtattatattattattaattattatagaaagattactacataaagtcatcatcggagagaccatcatcatctggcatgaagtcatccatgttatcctttttgaaagatgcaggacctgtattaaccagtgcagttttagctttctttttaccagcaccacctaaagctgtaccaccagtttttttaagtctattattacgttcatctttaattttcttagtaaccattgcattaagagttgaaataacttttctaatttgttcaacagttaatggttcacagacatctctagcaagatcaattgcaagtgaatttgcatagaaaagtgatgatttttcacttatttcatgaagtgttgaacctaaagttttccttaatttttcaaaatctgccttattatttggagcgaatagaggatgagcagctaatggtgtatcaactgttaatttaagtgctccaccaccatttaattgattattattagcattagctctagctcttggatgatctgcaactcctaaaccatcaaataaatctgctgcattatttaaatctgcatcaatttcttgctttctaagcatttctttacgtgttttttcatctactagatcaatttctaataatgttttcgatcctttattcttctttgcatcaagttttgccttttgagctgcctttaatgcagctaattcttctttcttctttttctccttctctctttcctcatctgaatctatatcccaagattcaagaactgcttcatcatcttctacaccatcttcccaagaagcggatgcaggtgcggcagaggagccaatatcgaaatcttcatcatcccaagacatattgtttatagttgtttatagttgttattctaagaaaattaagtaaaattaatgaagttgacgttaagttagttatatagttgaaaatggcaaaaaaatttaaaatctgcaaaattcgagaatttactatgagaaaggctctttacttagtgattgtctctgtttgccctctaatagttatctatcttttatccttaatcactatacaaacaatgcaatttataccacaatcatcacaaccaaacacagtatccactctctcagctgctcaagctgctccatctgctccaggattaccagatgctttccgtgcaggtggtccactttctttaacttcaacagttaatggacgtcatccacttgaatcaagaattaaagaatgggatgcaactcaaatgcaattacaaacagagatacgtagacgtatgcatggtttagcagatccattaaagagggaaatggatttagcaatggtttcaaaatcaagtgtaagaccaggattaaataactcaaatgttcatttggatattctcaataataaagattactcaattgattgggaagatatatatagtgatagtaataaatttgataccatacatactacaatggaatctcaaggtcgtatataagaataatactataataatcttgtataatcgtatataaataacttttattaagagaaaccctcgacatgaaaacttttcagtgatcactgcaattacctgatttacactatagtataacattcaacaacctacatctttaactgatttctttatctgataaccctctatacacactcttactaccttatcaatccatataattaactatgtcttccaccaattctaactctaatgatatcacatattctccggccgaaattttggccatttataataatttaaaattaaataataatattaaaattgacccaaatgcagctaactcaaactcttcaagagcttcatctttaaaagatccagtttcaatggatttgttttcaaaagaggaaatacaatctgctcaagagaaaattgaattaaaacaacaaagagaaccaaatgagagtcctggaattgggaaagatctaccactttcttcatcaatgacaacatcaacatctacttcaacaattggtaattctacttttacaacacctgaatcaactaaatggttttatatggatatgaactcaattcaacaaggtccatttgattcttcattaatgcaacaatggtatttacaaaatttattatctcattcattaactgttagaagagatattgataataattggattacaatttcagatttatggaaaaaatgtaatgctttaccaaattataatattcaaaatgctccatttaatcaatcattacctaaaatactaatttctaatcctaataataacattcctaaattagcttcttttaattcatcttcaagtatgtttgcaaatcaatttttcaacaataataataataactcatctgcaattaattcaactaatccaacaactactaattcacctgatcctaatattgctcatatgtcaacaattgctaataatggttcttctgttacaactccaattgattcagcaactcctttaaattcaagatctaattcaagttataataatttattaatgaatccaatgatgaatttgagtggggtcaattctatgaataatatgaataatatgaataatatgagtaatatgagtaatatgagtaatatgaataatttaaatttaaataatttgaatggtttaaataacatgaattcttttgataattcattgaatatgaatttgaataatatgtttatgaatgatattaattcaatgtcgggtataaataatctgaatgttaataattcattgaatatgaatatggatatgaataatttaaatatgaatatgaatatgggaatgatgaataatttaaatatgttagatcaaatgtcaaatatgtctaatttttcaacattaacaaatatgtcaaatcttaattatggtttagattcaatgatggatccattactaatgaataattcattaaataatagtatgaatcattcaatgaatacagtaatgaatggttcaattaatgctacaatcgatccaattaataattcattgaataatacttcagataatgcagccaattcttttaattcttttagtaatatcattgatgggttagataaatctaatacattgggtaatgaacaaccaattccatctaatgaaaaaactttaaaagttaatgaagaaatcaaacaagaagttaagcaacaaatcaagaaacctgaatcagtttataaagttaaggaaaccattcctgaaccagttaaaacagcagaaccagaaccagccccagctccagtttcagaaccagttaagacatcagtaccaccacctgtttcaaaaccaacccctgttacaaaaaaacaagattcaattcctgaagctgtcagagaatctttgaaacatgcattttctctggaagaacatatgaacgaattgaaaatcgatactaaaaagaaacaagatcaaattaatagagaaaatgctgccgctgcattagcagctgctgaagctgccgcagctcaagaacaatctgctgaagaagatgatgatgtttcagataaagaagaaatttcagctccaattattgaagaaaagaaagaacctgtaaagcaaacttctaaaccaattaaatccgttgttgcaccatgggcatcagtttctaaaaatgttaaaccttctaaaacatttgagcaaattcaacaagaggagaaaatgaaaaagcaacgtgaacttgaacaacgtcgtaaaatggaggaagctgatagattattagcttcaaaacttgcatttgaagaatcaattattccaacaattaatgttaacaataaaaagaaaattgtttcaattgctgaattaacttcatcaaattcagcaaataatttaccaactaattcaacatgggctgttaataataataatttaacatcacttccaattaaatcatttgatgaaattaagaaagaagaattagaaaatgcacgtatgaatgaacaattacaacaagctgaaagaaatcaaagaacaattgcagaggcaattgcaaataaacagaaaacttctaattcatcaatttctaatgaaaatcaatcatctaatgcaactaattcttggactgttgtatctaagaaagatgcaaaacctaaagtatcaactcctgtaacatctacaattccaatgacaacacccgttgttaaaactacacaagttagatatagtgcaccatcagtaccaagtatttcatcaacatctaaaaattatccaccaatggcaattgaattcttaacatggtgtaggagtcaattatcaggtctttatccaacagttaataaagaagatgttttacaaattatgatgcaattaccatcaggttctgaaagtaatgaaattattgcagatacaatttattcaaattctagtacaatggatggtcgtagattttcaacagaatttatgaaaaagcgtaatcgtattgaagatacaattaaacgtcgtgaatgggcatttgattggtttgatgcaattgaaggtacaaaaaatttaccaattaataattcaacaactttcatcatcatcaaatacagaaaatgatgattgggatagtgcattcacagttgttcgtaagaaaggtagaaagggtaattagaaaatatagaattatatagagttatatagaattatttattattattattattacttatttatttatttatttatttatttctttacaatattaatctttatagaatcaatacgagcttttatatcatccattacattttcaacacctttataagtaaggttttccataattttctttctttcattaattgaattaattctacgtcttaaagcttgattcatcataacttcttgagcaattgggaaaattgttctactccaaccttgtttataattttctgcttccttggcaatttccatcatttcagcatcttgtaatttaacttgcatttgatatcttttaaaactatcatcaccaattaaaccttttgtatataaaatcataattgaaggttcagtttcctttaatttaataattctacgcattgattcagctgcacgttgaactaatgaagttttcaacattttttcatgagcatttaattcctttaaatctgaataaattaatgcaggtattgaatcaattgttggtgtatcaatatttgcagataatacatcctctgccttaatttcatattccggattgaaaagtgatgatgatgttaatttttgtaattgatgaactttagtacgacgatgatatattgaaaatgtaattaatgtaaatattaaaacacctaaataaagtaatggtgttgcaagtgatatagattttgttatattttcagtagttgtttcattacctgttgcattagctgttgctgttgcatattctgtaaatttttcaaatgtttcagttgcactttcagcaaatgatgtagtactttcacttgacattattttatgtactaggataatatacaaagaacctataactacctttaataagaacacgtcgatcaatgaaacaatgcctaaattcatgcacacagtgaaaagttggtcagattaaatttatacaaaacacattacataagcagaatttatttacgtttcttttcataattatctctaactgcttcaaggtattcacccttcttggtaacatccatatctctacctaatagtttaaatctaccattattggctaatttctcacgtattatagtatctgagatcatatcattaccaatatctgacatatcacttaactttaaacgatatttaacattcatatttaaactaccaaaattgcaaaataaccaatataatttacttgttggaataactgtctcagttacaccaattggtgatactttaactgacattacctttaatccataatcctgcatttttaaccattttacaaaatgctccaacatcaaatccttttggatatgataaaagtcctttaccattagtaattgtaccttcaacaattacatataatgtactattatcaccaactaatttttgtaaatcctttgaagcatcaatatctgatgatgatgcatcaatatctacaatattaattaaatttgaatcatttacacttggtattaattcatatgaaccattaaaacaccaattaacccattgaaaccaatgattcataacaacaattcctgaacttgttgcaataccaactttaactttcttagagttttcagatactaatttccaaataaaccaatctaatggacctgtagcattaactaatataacatctttacaatgtggagattttttcaatttattagtttcatctgattttttaataccttcaacaataagttcagtttcagaaacattgaaaaaataagctaatacgacatcagttataatcttagcacctgatgaaaatgtattcaaaattggtacgaataatattaaagttggaatgaaaattaataatttaacaattataataattgaatggaaaaataatgttggaatagttggttttaatgaaactggaataaatggatttatcccagtagttttatcagaatatattgagaacttctccatagtgtatttggttaataaaaagagagtaaattacgtgaattatagagttttgaaagtgttgaaataatttcaggtatcgatggtaatagactgtgcggatttatactttgtcctattaagaaaaggtatagacgtaggttgttgaggttattagaatatatcaccatagtttgtttttatataattacataaagaggattgtttataagatgtaaaaagtatatatcgttgtttttttttctggtattgataaagcataaatagatgtaaataaaaaataatgaaaaaaacatcatcccgggatttaattttgtggccatggaattgcaactctttctcttattcctggataatatctaaccatttgttcccaaacttgcagtctttgaatactagcatcactagcagtacctgcattagttctagtaaaagcatcaggatcaacagataatccaatcataaaagtaacacaaccaacatctaatacattaattgttgaactaacaataaaccaacaaataatcatactaccaataccacctaaaattaacatttcaggtcccatttcatttaataaagttgaaaaattaattgttaattgtaatacaacagcagtaattattattgataagattgaatataaactaattgctgtactaattaatgaatcattaattaaaatatcaatacctttatattttaaaatttcaaaagtatctttggcactttcataatatggtttaccatacattgaaagatatgaataagcatatctattaaaccattgtaaccaatattcaaattcatttgcaatccattccagtattgaaacaatacaaattaagaaacaaaataataaacctgaatcatccatttgattatctctatctctttgaaatctagcattttgcatctttgattttaatacttgtaaagaaattctaattgtttgaataactgatacaattaatgaaccaaaacatatactaccaaaacaataagtaaaagctcttttcattgaacctaaagctggagattttggtttaactgttgaatcataagtatcaaagaaataccaagaactgaaaatacctgataatattaacatgaacggtattttgtaaaacttggaaaatataacaacctgagaaaattgcaaataaaataacaaatgatgaagtatttgataagcaaatatcattaccattagtatgaggacaattcatatcatcatttgtaattcttgcattgacaattataatcaatgaaaccatataaacaagtgaaattatgcaagttattaatgatgataaaatagaaatgaatatagttgaagggtatttattcattgcattaacgactaattttatcatcaaagcagagaatgagaaacgattaaaattttgaaacatgaataataatgaaaagatacccaatgcaccaaacattaaagaggggaaaattgcaccttgagttatcatagtaccagcaattgagaacattgataatggaaccaataaaaatccaattatcaaaaagaccattgggaaagcaatatactaatataagtaatgatacagatatcaatacaggagtaattgttgaaactaatattaaagtgtataatgcctttgtacccttagataaaccatcggtattcaatgaaaaacttattatatcactagatgatgatttatatgaattataagttaagaatgctaatcctaacaatgttgcaatgaaagtataagtgaatgaaacatcattatatttcggagtttcaatggggaaggcgtcctcatatgcaggggcgggagttggcttttcaggtatttcaaatgagtatttatattcttcattttcatctatattatcagaccaattggcatatgcgccattagtaggttccgcatatggcggtggtggagcaacagacattttgtagtaataaaagaagacacatcaaagaagcaaacagaaagaagaagaaagaagattaattaaatttattattaaaaaggtcatgctgtggattataataattataagattacgtaaagtctttatgatgtcattaagtgtggatcattcatactataaataccccaggtttttccacttttttcggtaatttattaaagtcacttcttttctttcttttggcaatacaactacaatgtctaatcaatcttatattactcttaataacggtgttaaaatccctcaagtcggctttggctgctggaaagtcaataacgatactgccgctgaacaaatttatgaagcaattaaagttggttatagattattcgatggtgcaatggattatggtaatgaaaaggaaattggtcaaggtattaaaaaggcaattgatgatggtttagttaaaagagatgaattagttattgtctcaaaattatggaatagtttccatgcccctgaaaatgttgaattagcaattaataaagttttatcagatttaaaacttgattatttagatgttttctatattcatttcccaattgcacaaaaatttgtaccaattgaagaaaaatatccacctaatttttattgtggtccaaatggttgggaatttgaagatgtaccattagctgaaacttggaaagcaatggaaaaattagttaatgatggtaaagttaaatcaattggtatttcaaattataatggcgcattaattcaagatttattaagaggttgtaaaattaagccacaattattacaaattgaacatcatccatatttagttcaaccaagattaattaaatatgctcaagataatgatattcaagttactgcttattcatcatttggtcctcaatcttttattgaattaaatcatccaaaagttaaagatgttgtttcattatttaaacatgatttaattaatgaaattgctaaaaaacataatgtttcagttggtaaggttttattaagatggtcaactcaaagaggcattttaattattccaaaatcaaataaaaaggaaagattattagaaaatttcaatgttaatgattttgatttatcaaatgaagaacttgaacaaatttctagtttagatattaatttaagatttaatgatccttggacttggggcccagaaatcccaattttcatctaatgataaaagtattttatatagttatagttatatagttatatagttatatagtctttataaagctgaaactttaggattttttgaaacatcatcataaatatcaaatcttctttgaattgaaattggaatattttttctagcttcaacaatttcatctttctttaattctgcataagcaatatcttcctcgtggcctaattcaactaaaatattaccatttggatcaacaaccatactatgaccataagattgataaccaccatttggatttctagcaggtgaacacattaaaacataattttgattatcaattgctctagcaactgaaaattttgtccaaaattttggacctgtaattgtattaaaagcaccaggatatgccattataccagcacctcttcttgatgcaattgtagctaattctgggaatctaatatcataacaaattcctaaaccgaaaattgtatcaatttgaggaatttcgaaaactgtggctttattaccaggttttaaagaatcagattccttgaaagttataccaccaggtattgaaatatcaaataaatgaactttcctatgtttagcaacaatttcaccatttggatcgaaaacaactgatgtattatataaactaccatcagtttcatccaattcaggaattgaaccaccaataatggacacattattctctttagctaattttgataataattgagttgtttcaccatcaggtattttctctgcataatttttaaattgatcaactgcatatggtgattggaaacattcaggtaatactaatagttgtggtttaggtgtatgatttaatgcttttttaataaattcaggtaactttttgtaaatttgctgatttatctgcacctgcatgaaattgtaaaagtgcaacttgtaaagattttgagagtgtaactgctgacattgaatgaagagtttattgatcaaaagaaagggaataaaataataaatattaaaacaaaaccaaacaagtgttatcgataaatgactaatcagttaaatcacctgctataaaaataatattctcaatttcaaccacagtttatcatcgttacatgttatcatgaagttgtttgtatgtgtggtatattagatagtttgattccttatatagtgactatactactcaattgaataagacgtagtttattagctaaatattttgtattaatactatactatatagtaaataaaagaaaaaagatcaacttaagggggctcaactgacaacacgtgactcccattggacgatgcacaaaaatatattcaattatgttccgtctttgtactttgttgtttatttaactgttgtttctttcttcaatcaataacacaatcattggtatagcaatttaataacaatctccaatgagttatcaacaacaacaaccacctccacaatactatcagcaacaaataccgcaacaatactatcaacaacaaccacaacaattttatcagcctcaacaacaacctcaaccagtttatgtgcagcaacctgctcaacagactaataataatgaagactgtataatggcatgttgtgcttcattgtgtatgtgtttaactgttaatttactactaaatgcatgtttgatgtaatgataataaaacttgtacattttctaccattgatgtatataattagtgtttacgatgattaaagccaaatgtccaatatactactatactaatatccgtatctataatatatctaatctacaatgtatagctcttaatcaatcaataaatctctttcatgaacatcaaggaaaatgccatttaaagacaagatcggtaaattcttctaaatcaaattatctccggacattccacggatttaaaaaagatttcggttcatgtttccactgattagatctccttttcatttcaactgttttcttttacaacttcttctctttcttttactttcctttttctgtataaacaaccaattcacatgtttaatatatcacataaattaacttcaaaactaccgtttcaaattcgatatattcaacaatgtccacctcctaaatacgatactggttgtacttattgtaatctgccaagtgaaatggaagaaaatttgaaatctccacctgaatcaatcagaaatactattccaccattaaatagattaattttccatagatcaggtaataaagatcatgataattggcccaaaaaagttgaagtagtttgatattatgcgtaatatttctaaatttggtagaggtaatggtaatatgatttgtatgtcttcattaagtccaataaatgaaatgacaagccaatgatcaacagaatgttgattttgcaatttatccagatgctcaaacctatttctattaatggtaatgattccacagaacttgaaaaattattcaaaataattaattcaaatgattcaaataattcaatttcattatctaaacattttagagcttcaaaaattgataaaactatagtacttatatgtggtcatactcaacgtgatataagatgtggtgttttaggtaaacttatacataaagagtttgaagaagtattgaaacgtgaaaatttaggaaaatgatgttgaattgggttatataagtcatgttggtggtcatgtttatgcaggtaatttggtaattttgaaacctaatggtaaaatgttttggtatggtatggttagacctcatcatgttcaaggattggttgatcaatcaattcaaatcggacgatctgattgaagaattatctagacaataaactatatcaatatttctgaataaaaaaaggtttatttcttatcttacttacagtttataaaatataaatacattcataaatacaaatttgaattaattcaatttatcttaattatttatttgcactggttcttgcacctgcacctgaacgaattaagtctaatgattcttgtgaaactttaacttttggtaatgcaaaagatccagtattatcaggttttggtaaaaatccaatttcaattaaatatgaaacataaacggataaaacttccttagtaacacccctacctgatgaataatcaacaccattagaattccattctttatcaattgttaaaacttcaactgcagttagtatcatctaattctggtgccttagtttcctctggtaaatcacctaaaacaaaatgtaataatgggaataatgcactatctttaccatcatcaataatatatttctctaatgatttacaccaatctctataatcagctcttttaacattatatccaaattcatttaatgaatttaacatttcattaaatttaattcttggatgaccagtaacttgaacaactgataaattttccttagttttaacaggtggatgaagtgcagatgcaacaacaactcttgcaacatgatcaactggtacagtattaacactattagtaatttcaggatatgaaccaacttcaacacatccctttaacattcttaataagaaatcatctgtattagcagaacctgtctcactaaaaccttgaacataacctggtctaataattgcacctcttaaacctaattcacctgcacgtctaattatatattcagctgcccatttactttgtccatatccaccacctaatccagatttagctgctaataaatcatctgattctggaatacctcctttatcaagttcatttgaatgtaaattagcacctaatgtaacataatgtggtacatcaacagttgaagttgatgaaacaaatgaaaaattctttgccttaccttcggcacacatatttaatacattgattgttgcaataacatttgcatctcttaatttatcatatggataaacccagtgaacctaatgcaccattatgaataataacatcaattgtatttgttaattctgaccatttagaatcatcaagtccaaattgttttgatgatagatcacccaaaacaacattaactttggaatcaaatttttcattatagacaccataaactttacttgccttaactaatctttctaagcctgatttttcatcctttgctctaacatgtgcaaaaatttgaacgtctaatttagaacgtgataataattctctgataatgaaagtaccaaggaaaccagttgcaccggtaacaaaaacattaacagttttagctgtatcaattgattccaaagttgcatatgttgattttaattcttctttggataatttaactgcatcttcataataatcaatctttgcagcagttgattctgcagcttcttcaatttcactaatatctttaccatcttctaattgtgataaacgttcaacttctttagcaaaagcttgaacagttgggtgtttgaaaatagtacctaatggaacttcaattgataatttctttcttaattcaaaaatcattcttgttgctaaaatagaatgaccacctaaatcgaagaatgaatcatcaacttgaattgatgatggtctatttggtaatactgaaatccataattctttaatcttcttttccatttcagtaaattcaacatctgatgaatcattagttaatgatgaatattctgcaactttattgatttgttcctctgatggtaattgtaattttggtttatcaaccttaccatttggatttaatggtaatttaggtcattggaataattaatgttggaattgaatatgatgctaaacgtttctttaaatgtaattttaaatctttaattaatttactaaattgaactaaacccttaacaataggatcggtaattttttctacttcatcagagataattttgaaattatttaattcttcaacaatttttggaactaagaaagtaactaataatggttcattatttttatcttttctaactaatgtgatattttctctaatgagtgcatgttgagaaatatgtgtatcaatttcacctaattcaattctgaaaccacggattttaacttgatcatctgcacgaccacaacattcacaattaccatcaggtaaataacgacctaaatcaccagttctatataatctatctcttggtagtttccagaattctctccaaggttcagcccttatctaattctttatcctttgcaataaattcatcaattggaacataccaattagttgacgaatttttctttagtttaaatcatcattcattctataaccttcagctaaacctgcagctctaacataaatttcaccaacttcaccaataccacaagtttgagttctatcatttctattaacaactaataattgaacattttgcatacctgtacctgctggcatgatatctttttgagtttctaaaaatcttggatctttatttctacttggaatttcaaaatatgaaacagctctttgagtttcagttgtaccatacatattaacaatattacaattttcagccaaagtttgtaaacgtaaacaatctctctttgttaaaatatcaccaacgaaaaatgcatgatgtaatgatttaatttctgcaattgcttgagcacttaataattgacccattgcaggtgttaaatgtgtgacagttgcaccatgtttacccatccattcagctaatttaccaggagtaccaatatcatcttgagttggaactaataaagttgcaccaaggaataatggtgtgaacatatctctttgaattggatcatgtgcgatacctgataacattgtaaatttatcattttcattaagattaaatgtttttgacatccaagggaaataataagcaagtgaaaaatgtctacctaagacaccttttggtaaaccttcagaacctgaagtaaatgaaagtgttggattagaatctggaccaacaataacaccagttctttgagttttatattgttcatattcagatagaatatctttaccgttaatattaccaccaattaatgaaccatcatcttgaatttcaatttctggaattctagttataacatttaattcattcttgatgtaatcttcaacaaaatcatcaataacacctgctttcttaataccaataataccttgagggttagcaacttttaaataaacagtttgtctagcaggtggataagcaggatcaatgaacagagaaagttgcaccagcctttaaaacacccataactgaaaccatcaaatcaacacctctataagcataaatcataacgatatcaccccttttaataccatgttttaacaagataattaccaacaatattggatgcttgatcaatttgtttataagtgaaatgtctatctttatcgttttcattaaggaatgaagcagtttcaatgacacaagttctttcagggaatttatcagcattatctgaaaagatatcttgtaattgcacctctgaaattagaccaatctaagtcaatagttggatctggtaaaactgatttttgagatgaagtgattaaactaattttagaaatgattaaagatgaatcatttgaaacttcttcaataactttaataaattgttcagataagaacttggactcttgatgatttataaagtaatgaattatagtaaattgataattctttatttgatttattgaaatagaatgaaatatctctaattgaaccattaacggttgtatctaaggagtcagaatttgttgaatattggaaagatgatttatacaaagcaggtggtttttctaaggatttagaggattgtaaagcatcaacaatagtttcaataggaatatgttttgaatataattcttcataagttgatttaacattatcatataattgtttaaaagattttgaaggatcaactgataatttaaagatgaattcatttacacctaattcattattggtactaatagtaatttcatcatcaccagtaagtctataagttaataatacataaactgataaagctgtgaaaaaatctgaattttcaggtaattgaaatttaaaagtattttgaatgacactaccatcagtaggtctttgaaaatcaaagggtaagatatttaaagttggagaatccaatgtttgggtccaaaagtccagatctagcatgtttgtcaaactaaaagaagggaagaaaaagaaaaagaaaccaaaagttaaatctaaattgagagtctcctaactgaaaaatcatgtcaatgtcaattcgttgccaatagacttgttatgattctccataataaaattaaatgactcagaccgcattacctaatatggtaattcaaatttttaaccgctgaagatcggaattttcaaattttttcaaattttcataaaaacttacgtaatcaaaaataaatagacgcgtctgtattacgtaatatgttttcaaaagaaaataacaacttacccgccttctttgcttactgccagtaaaccattatattggacattacatgaatttaacctttaaagattcagtatagagaattagatttctataaagaagggagttttatcttcaataaataaacaatgtctcagaggaagttattacagtatgtataatcagtctttttcagtttgtataccattatatgatcaattactaacattttattatcattatgatattattatctattatagggaaattgatcgtgtattcaagaaagttaaggaaggtttagaagtctttgactttatctatactaaacttcaagatactgataatcaatctcaaaaggaaaaattcgaatctgatttaaagaaagaaattaagagattacaacgtttcagggaacaaataaaaaattggatgagtggtacagaagttaaagataagaaaccattaattgaacatagaaaattaattgaacgtgaaatggaaagatttaaagaagttgaaaaaatgatgaaaacaaaagcattttcaaatgaagcattagcttcaacgaatgaaataattgatccaaggatgaaagaaaaaatggaaactgctgaatttattcaaaataatattgaagaattgcagagacaaatggagagtgtagaagctgaaattgataatataatgtcaactttgaaaaagaaaaaatctgattctgctaaacaatcacaaattttacagctacaaaaaattttagagagacatcaatggcatataacaatgttagaatcaattttaagacatttagagaatgataatttagatgttgatcaaattaatgatataagagatgatatcgaatattatgttgaatcaaatcaagatccaaattttatagaagatgatacattttatgatgttttaggattagatgatattgaagatagttttgcagtaatacctgttgatgattcagatataacaagcaggtctcattctgtaaatgatgctatgattaatgatgctatgaaagataaagaaaaagaaaaagaaaaagagaaggaaagattggagaaagaaaaggaaagagaaagagagagattagagaaagagaaattaaagagaagagagaaaagagaaggaaaaacttaaaagttcgattgatactgaatctgcaaaaccttcagcttctaatgttttacttaatggtaatttaaaggttgcaactccaattggaacgcccaaattaaaatatgctagtgctgttttatcaggtataaagaaatcaaatccttcaactccaagtaatgtaccaatacaattaagctcaacgcctttacaagcaagtgttcaaactccaacaccaatttcttatgcaacattagcatcagctgtgcaatcagcgcataaatctcaagcacaggcacaggcacaggcacaagcaaattcacaaacacacactccacaacctacatctaaaggactatcaccatctacagtcaataaaacaacagtaacaactacaacaaccacaaccacaacaacagtaacaacaacaacacaaaatccaagtacaaatagtggaaataaagaatcttatgattcaaatactggtataacatcatcaacattatcatctactactaattcatcagcagaaaacaatcagttatcacaaattgatttaaataatattgaaagtatagcatcattccgttcaaagaaaattttaaataataattcattcaaacttccacatataaatggtatagaggaaagtttatcatttttaaattctgataattataataatttaccaagtgggattgattcatatttaaaatcattagaagttgctaaggatagaatatttaagtttaaaaaacctgatgaattacatgttccatcaaagaaatcacagccacctccaatgatttgtgaatttaaattaccaaaacttgaagatatttcaatatttttagaaaattcattattaaattgtcctgattcatttgattctgataaacctcataattatattccatgtaatccatatgttacacaaccaagttttccaattgatccattacctgaaattgttggatcaacaaaattattgaaaaatgttagtttagatacattattttatggattttattataataatttaagatcaccatcaatgttaacaagtttccataatttaaaacataatgatgatgatgattatttacaaattataatagcaaaagaattacatcgtcgtggatggaattataaggcaagtacacatacatggtttacaaaggataatgatgatggattatcgaatggtgattcatcaataacacattggaaaacttttgattataaggatacatggatggttagaagaaatccaaatttccaaatagatgtatctgatatcgaaacaggatactactaagtgtttgtatatcattaatgtaatgtatattgtatagaataatagaataattattaactataatttaagtgtaataatcggtacttcttaaataggaaaccttaggaaccatcccccggccgaaagctagaagtttattatgtcagaaaaaaagctggattttctattataacggagattgctttttatgtcaaaataactctattagttaatttagtcgttaattatcaaccatcagcttatcacaatttgtaacatttacaatattgaaaaatggaaaattgggttacttttcccaaattatttcaatttatatcatttgggatgttcccctccacatttgttaatttagtttccactcttttctttactccctcttgcttcattctcttaaagttttagtattttgtttaacatcaacaaatatgagttatcaagataacaataattctgattacgaaaaaattaatgatcaattagagagattagactccgaaattggtcaacctgttcaattcaatgcttcaaagaagagtttcttcaatgttaagaagttaattgttatggtattcttagcaattacaattggttcagttttccacttcaattcatcatcttcttcttcttcaattggtggttgttcaggtaaaaaaaattgttacaggtaaatttatgacaccattcccatttgatgaatcaaaacctatttgtccaattccttcaaaagttgcaattaaggaaaaagatcaagttcaatttattttacatgatgaaaaatatcatgaaggtgttattgaaagattttcaaaatctttacaaattgatacagttgtttatgataaaactacagattattcaaaaatggctaaatttcatgaatttttagaaggtgcatatccattaatttataaaactgctgaagttttcaaagttaattcttatggtttagttttccatttcccaggttcaaatgctgatttaaaacctgttatgattgcagctcatatggatacagttccaattggtgatccacatgattggaatgaagatccttttagtggtagatttgatggtgataaattccatggtagaggtgcaagtgattgtaaaaatttattaattggtattatggaagcaactgaaaaattaattcaagatggtaaggataattttgaaagaggtgttattcttgcatttggatttgatgaagaaaaatcaggttttgatggtgcattccatattggtgaattccttgttaataaatttggtgaaaattcagttgaagttataactgatgaaggtccagttatgtttattgatacattaggtgattattattcaatgattgttaatggtgaaaaaggttatgcagatattgaagttgaaattacaactcctggtggtcattcatcaaatccaagagatcatacatcaattggtatgatttctaaatttttaactgattatgaagatgatttatataaaccagttttatcagatgatagtccaatggttggattttttgaatgtttaggtgaacatggacgtttaccaactgatttaaaaaatgctgcaagacgtgttagatatgatgaagatgctagagattatgtccttgattatactaataacttaccagttattaaatatagtattagaactgcacaagcaattcgatattgttaatggtggtgataaggcaaatgcattaccaagattagttaatgcagttattaatcatagaattgcatatggtaatgatttagatacaatttgggataaattaacaaaacacggtaaagtttcagctgataagtatgatattggattaacagttaatggtaaagaaatttatccagaaaatgaaaatggtaatatgattattagatattatgcagatccattagttgatgcaccagtttcatcaagtgaagatgatttttataaggaatttacaggtataattaaatcattttatgaagatgaagttttcccagaaaaattcaataaagattctgataaaaaattcattattacaccaagtattatgagtggtaatactgatacaagacattattggaaattaacatgatcgtatttatcgtgttcaaccaggctcacttaatatttttgatgcaaatattcatggaccaaatgaatggactgatttaacaactcatatgcaaactgtttcattctattacaattatatttcacattattgtcttccagatgaagaatgattaagatattagttcattaaatatgatatgactatatttcaaaaacttttatttctaaacacacaaacaaaaagacaaaaaaacaacattttaattttctagtttacattattttacttccagtatgtgttacattatcttttattttctcttatttatttctatcaacattttgataatgtttttgttcatttttattattgaagatataaaatctttataattttttaaaagtgaaaaatacttagtattaaaaataaataattataaaacaaatacaaataagatagtaactcgagtcaatcgaattagcttaaataactagtattccagagattagttatactttgagtattcagggttccaatatttacgtaaacttggtttatattcagcacctgcctttgtaattgcatcaacatcagcagctgataaattccagttatcaaagatacccttaaattcttcaaatctttcaagtttagaagtagtagtaattggaacaatacctctttcaataacccatttaagtaagatttgagttctagttttcttatatttagaagctaattcatcaattaattcaataaattttaaacctgcaccattagttaaatcaccactaattaaaggagctaatggagaataagcttcaacagtaatatttttagatttacaataatcaacaattccaggggtttgattttgtaagaaagcattaaattcaatttgattaacttgaggatttgatttagttgtatcccaaatttcttcgatatcatcaacggcaaaattagagacaccaatttgtttaactaaaccttcatctaaagcttgttgcatatatttccaagcttcctttaaatcaaaaccgtgagattctttcttaatgaaaggagcatgtaataaatataaatcagtataaggagtatttaaatatttattgaaagctttaattctttcataaggatttgaaaaagttgaatgagtagtataggtaccatcaccagcataatatttatcagtaatgaaaatatcttcacgtttaagatcagtggttgataagatggtatctaaagtttcctttaattcagcatcatttttataacattcagcagaatctaaatgaatgaaaccttcctttaatgcggttgaaaagatcttaactaacagaggattagctggttgatctgcagttgctttataagtaataggtacctgaaccaatacctaataaagggataccggagttgtttttaggtaatgtaaaagccattgagttgattgtagttgatttggggaaaagaaaaagataaagatagatcaagtttaaaagaaaaggtgattagtaattgtatctatatttctacagtcccaaatccattttcagtaatgttgatatattgatctttctagaagcatcgaatggaaatttattgggacaataatccatttgttaatctacttcatccatattttataatagtactttgtaaattaatagatgaatctatccatccgacggtctgtctaatggcattctcaggtaagaaggtattgtataagctacaagctgaattgtggtctatattataaagaaacattaaaaagagtgcattttccctatttctttactttataatacgatttttacatagtatctgtaattaaatcgcctactcatgtaaacctagtctaacctacttccaatcacttgatataaacacctttaatcaaagtggtaatacaaagattaatataagaaaaggcggcttaaacaatttgcacattctaaattttattaatgacgttgctttcttaatattacaatgggaaaggattaaggtgctatttctttaaaatcgatgatttgtatttcttttcttttctttttcttttgcttttgtcttattatctatacaatggcaaacgttctggtggtatctaatagaattccagttactatttctgaagagaatggtgaaagtaatgataatgataatgagagtaataaatatagttataaaatgtcatccggtggattggtcacggccctgcaaggtttgaaaacttcatttcaatggtttggttggccaggtctgaatataactgctgatgaagataggaaaagtattgaaaatgatcttaagtcaaaatttaattgttatccagtttggctttctgaggaaatggcagatttacattataatggattttcaaattcaattctttggcctctatttcattatcatccaggtgaaatgaattttgatgaaattgcttgggctgcttatattgaagcaaataaattatttactgaagaaatttttaaaaaagttaaagataatgatattgtttgggttcatgattatcatttaatgttagtaccttcaatgcttagagaaaagataaataaacaaggtttaaaaaatgttaaaattggatttttccttcatacacctttcccatcaagtgaaatttatagaattttacctgttagagctgaaattttacaaggtttattaggttgtgatttaattggtttccatacttatgattatgcaagacatttcctttcatcaattgaaagaattttaaaattagagacaagtcctcaaggtattagatttaaaaatagagatataactgttggtgcatatccaattggtattgatgttgataaatttttagatggtttgaaaaaggataatgttcaaaatcgtattaaacaattaaaatctaaatttggtgatgattgtaaattaattgttggtgttgatagattagattatattaaaggtgttccacaaaaattacatgcatttgaagttttccttgatactcatcctgaatggattggtaaagttgtacttattcaagttgctgtcccctcacgtggtgatgttgaagaatatcaaaatttaagagcaagtgttcaatgaattaattggtcgaataaatggtaaatttggtacaattgaatttgtaccaattcatttcttacataaatctgttacatttgatgaactgatttcactttattcagttagtgatatttgtttagtttcatcgactagagatggtatgaatttagttagttatgaatatattgcatgtcaacaagaaaataaaggtactttaatattatctgaatttgcaggtgctgcacaatcattaaatggtgcagtaattgttaatccttggaatactgatgagctgtcagatgcaattcatgaaggtttaacaattagtactgaaaagaaaactgctaattttaataatatgtttaattatgttagtaaatatactgcaagttattggggtggtaattttgttaatgaattaaaacgccataaataatagatgtatatagaattgttatttataatataatatcaatataatatttacattataacccaacaataataactcttatcaatcaatcgattctatcgatctttaactaagggaagtgaaaaatttaaatttttttattgtcagccttcttttttcttgatatgtagtgtgatcgtataataattatacaccaataaaccttttacaatctttgtttcagcttatctccactgggattatactgtatatcatacactagaacatctaaatacaaaacaaactaacatctaatatccaattatatctatcaatatgggtaatttgatgtctactcctctaacggagaaaaatttaactcttgtacaacataaacatttatcacatgcaattggtgaaatgcaagggtatcgtttacaaatggaagatgcatattgtgatctgaatgatgtaattgaagtggaattgaaagaaactaactcaaatacaagtcagagtctaaataataaactaaattcaataagtaagtaataatagttcagcttcagtatcaagagttaatacagcttcaactgatacaagtctacagacaagtacaacaatgagtaatccctgatataaaaactataccaattaatatatacggtgtctttgatggtcatggtggttcaagttcatcaaattttataagtgaaatattgccactgacaattaagagaagaattgaaaatgaaataaataatttatccattgaagataaattgaaattgattgaccctaataataatgaaacattacttttgattaattttcctaaaatattgaaagattgctttatgaaagttgataaaaaattttatcatgatccaaacaataatagtggttcaacagctgttgtaataattatatttaaagattatattataactgcaaattcgggtgattcaagagctatactttcaagaaactggtaaagtgaaaaatatgtcatttgatcataaaccgaaaaatctgggtgaattaatgagaattcataatgatggtggttacgtttcacagaatagagttaatgcaatactagcattaagtagagcttttggtgattttaattttaaattacataataataataattcaggtagatttaatttatcaaagaataataagaaaatatcattaactcctccagaggaatttcaagtaacggtagaacctgatattattatacagaaattaaataatttaaatgatgaatttttagttattgcatgtgatggtatatgggattgttataaatcaaatgatttaatagatttaataagacatcaattatcattaggtaaaaaattaactgaaattaatgaaattatattagataattgtattaggaatggcaaatactgtaactggtataggttttgataatatgactataattattgttgcattacatagtcaattaaatagtcttgatttatggcatagatcaataaagaacaaaatcttagatgaaaaattcgggaaatataatcattaattaaattgcaactaacattcattcacttatcaattactttatccctataagaatccttttattttatcctatatatgtttggtctccctggtggttatctattccatacttttccgtgattatcatctcgttctggttttgttttcaactaatcaatacacgtttctcagctactttggttttgttcatgtacataacataatacaatgctcatgtttgtttttacttttttccacgttacaatctttcacaacacttttaaagacttttcttcttttttattttgactctctattttactttttttattttcatgacacttttcattagcatgttatatagaaatatgtaataaaaaacttttctaaaagaactacttaatcattaagggtttcagattctgataaccaccgtgtagcttcagattttttagttgtagaaagtttcatcttatcattaacttttctaaaatctgcatatttaaaacctttacattcttgtcctttaaaacttgacatacacatccaaacgtaatatccaatatcaggtcccttaaaaagtcttcttaaaatcattcttttcttacaaatatcacataaaactttatcattctcatcaaaaggtgcatattgcatcctataagtaagattaaaacgtgcatctttcgtaattttgtctctttcatataatgaatcctttaatgttggaacaccgtgtttaaacaactcttgactacctgggagcataataattaatgaattattaggagctggaatattgaaaataactgaatctgcaggataagaccttctcattctaaatattcttgttgctccaatagttaatgatgcaattgttggaagtggtccaatgttagttaatttatcactatgtaaatctaaatgtgatttattatctggataataattaccaagacaaaagtcacttttccaatttttagtaatagcatattcaggtagtttattcttctgacaatactcctctaacacttcatttacttttttttcaacatataatttacatttaagtaactcatttgtaaatggatgtggtcttaagtcttcagatttatacactggatcataatcggttttgtcatcattactataaacaatacttttttgtgatgatgtacatagatttccagcaatataaaactgtttggctttaaaaagcattctttgactcattaatgaattagtaacttgttccttcaaatcatttggtagaaagttaggtattatacgaacaaatggcaagtttctctcaatatcttcttttgtgtataatgttatagttttacgtgtatcagttgaatttatcttagggaatttaagtaaagatgaaagagatgtttgattaacaacttgtccttcttctcttttccttttaaaagtgttagtttctaagatttttggctttttttcttttattggttgtttttcaattttaggttccaacttgttttcagattttgcatttgaatcttttatttcaacacaactttccaaaagtaattttttgactttttctactgatccagcacatgaaaccagtatatccaacaatatctccttatcataggttggaaacaactctaggagaaggttcaatctctcttctgtgttcattactaagagaaactcacttaaatatgattaaagtaaaacatgtttcgtgtcgtggttcatgatgtgatatttcattaacaaaattacgtaatctttttttttgtttttttttgtttttcaattgtggtaagaagcaccaagatcattaattaaattcgtcatcttaagaagaattatctttgattgtgaagctatccaaatatgaaatttcaaataagcaaatatgtgctctgactagctgtcaattttattgagttttaagtatatcataaaggtagaactgtgacggatagtgaataagttttaatatataatattatacaaattttacaagggtattgataatcgatacattatttagtcaatttatcttcaacccattcttgcattttaatggctttaaccatttccgcttcaccatatgaaacaccaaacgattttttgatatttaatgtccccttcagccatttttcagctaatgttctacgtttaatcattccattacgtgaaactaggatacctgtagattcaacatatgaaacaatgtcaacaacaattttaaatttattcagtaattttaaaatcatcagtggtgtaattgtacttaaacttcttgaagttgacgtagatgcaatcaaaacggtatactcacctgctttaaagacacaacatttagaaataccatcgaatgtttccatacaatgttcaatatcttttgcaaaataatttaatccacagtattcgaatgtttcatcaattttaccaatattgtatagtaattgtaattcaatcattctagttttatcagtttgattgactgtatgtaaaaatccaaaatctcctgttctaagatactgtttttgattaaattctagttgaccctttaaaaattctttattatctggattattatccttacctgcaaaatcatcaaccgttgagtttgatgaaacccatatttcaccaaattctccaatcttacaaactttctctgtttgtggattgacaataataacttcagtattaactgaaacaacaccggaatcaacaactgggattgcagatggtgaatctttaggattgacaatacttatatatccttgtgataatgcatgtggatctaaccataatattgttggctcaaatgataagaatgatcgggtactgattaatggattcattggatgattatacacatgtgaaatattttttggtttgatattggataacagtaatttatccttatatttaacatgcagtaatgcatcagcacgatcattgtcatatgatatcattaaattttttaaattcttcaaatcagttttaactaatgaattcttacttaacgcatagacaaacagcttatgactgatgtaaacattttcaattttatatctctcaatgatttgataaaagttcttagtatgtagtttgtattcttcataagtcatcaaataagtggtcgtacccaaataaagacctagtacacttccaaataaaaatcctaatccgaatgaatgatctgaacaaccaactattggtgaattaccactcatttgacatgtttctttcaaactcaaacacatatccataatctttttagagcttaattggtaagcagtataatcattatctgaagaaagatttaaccataacatacacgttgaagataaaaatgattttgaagatttcctttgctttctatattgctccattttcttatatgttgatttaccactagatgacgttttggaatgtttactggtgtttctaagttttgggaatataattcccaatctagttgaaagaaatttgatttgtgaagtgacttgtttacccttcatactcaattctgattcattattaacaaaaatagcttgaactttatattctttaacaatcttaactaatgtttcaacatcttcattgagagtttgcatatctttaccaattggttgcattggaataactacaaatcctgccatccaacatgcatacagacatgaaatatactcctcgcataaaggatacatcaaaataacaacatcgccagctgataaaattttcttttctaaaatataagaacaaatggtaaacaccttattttcaaatttagaccatgtagtcaattgtttattttccttaatgacaagaccttctacttgtgcaaatgccaattcatccgattgtttacttgatctaaattccagaagctcaacgggtgatttaaaatcacttaagttagcatgtgatctataatcaacagatgaatcacgactatccaaacctgaactttgataatctgcataacttaatatttcagatctaattgatgtacagtatggtgaccaaatacctccgattaaatcttcaccatgataaactgaacctaatgaattatatggcttaaacgaaacataaacactgggtagtctaccttctaaaaatcttctcttggttaatgtgttagcaatttctactctcccacttttcaatgatctggaaagtgaaccagttttagttacaatcaagaaaaatggccttatattatgatgtttttcaagtacattgaatgcttcagttactgtggattgaacttcaacttctgttgccctggatgtatccgatgctagttctaattccataacaccaactggtaaatactctttgttcactttaatattgaaaaacgcacagtctttgaaataaggaataaacctagctaaagttttcactaaatgattcgaatagtgatatttgtaaatatacttgttggataaattttgtgttaaatcaatcttgtccagattatgagcatttctctttctttgcatcttatagtaactttctaaatcagaagtcactgatatatttcttgaatgtgatttagtcaattcgtcctttttctctttatctttatctttctcatcattagaaaattctaaatattggtcataccaagtaacacgttggttaattctatcctcatataatccaagcacataaaccttgcccattatagataaatcctagatatccaggttctgacaaatttcaaactcaaaataccttcgtagtcagaacactcagcttggaaaaacagtttcagtatcatcaggtaatccccagtaacccccagatatacaattagaatctatccatatttcacccacttcaaaaacaccacttaatattttagtttccggatttactatagctaatgtggaatcaggtaaaggatatccaaaagcaccaactctaatatatgatgtagattttaaattggagtctgaagatgattgcaatttaggcgagtcattaataactttaacggagttcgtagatagtgattctttatcaatcaaaatttcagataatctatccataggtgttatcatctgcaaattcgtctaattcatcaacattttcatttttattaaaaacacaacccaattgttcttcattaccataccaatcacgcattgatacaattgcaccaccttgttcatttaatgataataacggtgatatggtttttttcggatatttattacctaaaggttttaaccatcgatcagataaaatctcattaaattcacaatcaacagtaattgcgtcaattagacaccatttcaatgaagacaaatcaacttttctcttattgaaagttcttgtagtctgagggaatgattgataattatataccaccgatttcaatgtataataatcagttaaacataccgatgttctatatgaagacattacatttgctaataacccaggaacttctgcaactttatgatatgcccaaataagtaaattcccactgtaaacactaaacaacaaagagaatatcataccaattgaatttctcacatctaatgtggataaataattattctttgaacttgaaggttttaatgttgaccttactaatggtgctctcatttctgatgatgaagttaatattttctccaacattttcatttgattaagtatagttttatgagaaattgcaacacctttcaattcaccagttgtatttcttgtataatcaatataagccaaatctgaaacttttaatggagggatctccatcttttttagatggtttataagtacccatatcggatgttttccaaacaaccataccctttggccaaatagatgttttattttgttttgaaactttttcaaaatgtttgaaaacagaatctgacattaaacataaatgtgattgtgtatcattcattattgttaccatttctcttgtaggtattgaactatttaatggcacagccacaacaccggccaagaaacaaccataaattgccaccataaaatcaattacttcaacattttgataaattaaaccaacacgatcacctggatatagagcagccttatttttgatttgtttagcaattttttcagctctgaaatatagtttatcccaggtaattacttctgattctttacctctttcatcaataattaaaacagcaggttctctttcagttcagttttgcacgtttacgcagtatcattgctaaattatcaaattcatatttagtatctgcatgtgatgaaatatctcttggatccaacggtttctgtaactctttccttatatttggattataatgattagtcatattgttatatttattaagtatttcatcatcatagaaaactggttgagttgttgaactaccatcaacagattgggaatgtgtatgagagtaattgaaaaagtcatcagactgtacatttgaactagttctagaaatgttattatatattggattctttattgaacttgaattagtatttgtgttagtattagtattagaattggtatttgaggtagaatttgaatattgagacccagtttctgcaataggtactgaacgtaataattccattcttttttttatatagcccttttctgttaaataaccatcatgaaaatctttaactaacctagttagttgcagatcaatatcagctgtagcattgttcggtactgtgaaatccattgtttatctagttttaaaaaaaaagaatttgaatttgggattcagagtgaaaaacatgttgatgtaaataaaactatagcgacagattctatgatgacgttttttcaatcttagttattatgggtcgactttaattgaattatcatttcttttaaagcaattgagtcatggttactttaaattgtattgcagatgtttgtttgattccaattggaacagctacaccatcagtctctaaatatgttattgaatgtgaaaagttaattcaacaaagtggacttgaaagcacattacatagtgcaggtaccacaattgaaggtccatggactgaagtcatggaattgattggtaaactacatgaaagagttcatgaattgggtattttacgtgttcagagcgatattagagttggtactagaactgataaaacgcaaacaatgcaagataaaattgatacagttttagcaggattaaaatagtttaattttagccagtaatccctatttataatatccctacttataatatgttttttagcgatttaagaaaatttcccagaatcctaagtctatggtttccccctcaccagtatctcataaatatcacatttgtagccacgatttaatagtaaaacacaattttaacagtaaatataaatttataaatagtataagataagataagatgaataatatataaaaaaacagaaattttaaataccatcaataacaattgatttaataacagtataatcatcaataccgtattttgaaccttctctaccgaaaccggaccagccaataccaccaaatggcagggaagcttcacctaaagcaccagtatttgcaccaatcataccacaatttaattgttccccaactctgaaaattcttgaataattttttgagaagaaataaccagctaaaccatattcagtatcattagctaattctaatacttcttcttcagtcttaaatttaattaatgggactaatggaccaaaagtttcatctttattaacaagtgcatcttttggaacattacctaaaattgttaaatcatggaaatttggaccaagatgtggagcctttttaccaccaagtagaatttctgcacctttactaattgcatcatcaatatgactttcaactttttgaactgctctttcatgaattaaaggaccatgagttgtatttggatctaaaccatgacctaaaacatatttactaacttctttagttaatttagttgagaattcatcataaacatcttcatgaatgtataatctatttgcacaaatacaagtttgaccagattgtcttaatttacaacctaaagcagccttaacagcgaacatcaacatcagcatcttcaaagacaataaaaggagcattaccacctaattcgaatgaaagttttttcaaagtttgagcagattgagtcattaataatttaccaacaccagttgaaccagtaaatgaaattttctttataattggagattcacagaataatttaccaacttctttagttctttcttgatcaacagggaacattgataacataccttttggaaaccagcttcttgagctaaataacctaaagctaaagcagataaaggagtttcagttgcaggtttaataactgttgaacaaccagcagcaaatgcagcacctaattttcttgtaatcattgcagaagggaaattccaaggagttaagattaccaacaacaccaattggttgttttgaagttataattctctttgaagcatgttgcacttgggatattatcagcataaattcttggagcttcctcagagaaccattcaaagaaacttgaagcataggtaatttcacccttagaatcagctaatgatttaccattttcaattagtacaaataattgctaaatcatcgaaattttctaacattaaatcataaaattttcttaaaattctacctctttgtctaccagttgattcctttaagaatttcttaaatgcaatttgagaatctttaataccttgttcaattacttcaattttagtatttgtaacattaattaaatgttcaccatttgcaggatcttcaacagagaaaacttcagaattatcgacaatccattcaccattaactaaagcaccagttttaatcaaattagcattcttaataccatatttagttgcaaaagcattaatttcttcaattgatgacatagttgacttgttactaatatattatatacacgattaacgttcagtaaatttactagaggaaataagcaaatctaaaagaattagaatcaatacattaataaaccgggaaagttaattgtttaaatacttgaaaagccatagtttatatccagcttaataatgaatcatgcagaatcttgtccagtggaagtgtctctcagcgggtaaaactcaataaaatttaccgctaagagtttccccgtttgaaatttgaaatcgagggctttagcgggtgtttctctagctaagtgcaggtaaatttaaatttattttatggggtatttcaaaggatctctgttgtgcagtcgatgcgtctgtgagtttgtagtgtggtcgataagactacagcttacgtaatacacataggcgcggctaaatatataggagttacctaaataggtaatttttcactagagtcatagtagcgcgcttaatttaaacctatttttaagaggcctcttttaattaatttaacgtcgacaatctgccaaatggcattattttttgactcatttattattgtcttttcaactttttttgttataaatttagcttgttcccactctttcttgaaatttttcatcctctcctttttctctttttcaatacttaatttttttttctttatctctttctataaagcaatagtatttactatagtagtatattatataaaaaaatgtctaagggaaaagtttgtttagcatattctggtggtttagatacttcagttattttagcatggttaattgaagaaggttatgaagttgttgcattcatggctaatattggtcaagaagaagattttgaagcagctgaaaagaaagctttagcaattggtgcaactaaatttgtttgtgctgatattagaaaagaattcgttgaagatattttattccctgcaattcaagttaatggtatttatgaaaatgtttatcttttaggtacttcattagcaagacctgcaatttctaaagcacaaattgatgttgcaggaacaagaaggttgttttgctgtctctcatggttgtaccggtaaaggtaatgatcaagttagatttgaattatcattttatgcattaaaaccagatgttaaagttattgcaccatggagagatccagttttctttaaaagatttgcaggtagaaaagatttattagattatgcagctgcaaagggtattccagttactcaaactaaggcaaaaccttggtcaactgatgaaaatatggcacatatcttcctttcgaagcaggtattttagaagatcctgatactacaccaccaaaggatatgtggaaattaactgttgatccaactgatgcaccagaaactccagaagattttacaattgaatttttaaagggtaaaccagttaagttaattacttctgaaggtaaagaaattactgaacctgttgaattattccttgaagcaaatgcaattgcaagaagaaatggtgttggtagaattgatattgttgaaaatagatttattggtattaaatcaagaggttgctatgaaactccaggtttaacaattttaagatcaactcatatcgatttagaaggtttaacattagatagagaagttagatcattaagagatacttttgttacaactgcatacttcaaaattattatacaatggtatgtattttacaccagaatgtgaatatgttagatcaatgattcaaccatcacaaaatactgttaatggtacagttagagcaagatgttataaaggtaatttaattattttaggtagatcatcatcaactgaaaaattatatgatgcaactgaatcttcaatggatgaattaactggttttgaacctcaagaagcttcaggttttatttctgttcaagcaattagaattaaaaaatatggtgaaaaggcaagagaagatggtaatggtttaactttataaatcaaatcataaaattgagtaacattgttagttatctttgtatagtatataattttttataaaaaaaaacatgatttagttaaaaaaaaggattgtaatattattgtagggttagaaaagagaagcttttgctgcaaaaaaaggtttgaaaactaatattaattattgatggataatttttaatcttctctataaatttgtagggtatttgtgcagttgagagaaagtgaaaaaggtaagtagttgcatgttgtatcttgtatctatttgagttgtactgtagggttaataactaaccttacctttttgatttatttagtaaagaatatacgcagcaggtttgtgttttggagttaagtttcatgatatggttgattgatctttattattcaatgcaacaataactggatttaaccaagctttccaatattttgcatttttcaatttatctaatctatttaaaataaattcaacttcatttaataaatgacatttactgaaaatatgattaggttttgaatttaataataaaattgaataaccaattatgaatcaaacttcttggttcaccaattcgaaactaaatgaataaattgatctggaactttataaaataatctatgaattcgtaataattaaatcatcttcaataacatatggttgattaaaaattggattaaaattatcaacttgataatcaaaatttattttatttcttaaagatctataaacaattgacagtctttcaaccattatattgatgatacgtttattttcatcatttaataggttccacatgattttttatgtttttcgtgatgattgtttatatcttcaaaatagttgacatttggtaaatcaaataaataatttggaaaatataaatcatttgaagttgaagatttctttattaaaaatctttctaaactgtcaatgaatcttgaacaacctttaaaatatgaattaaaagtatcaccaataaattccatatttttatataacattaggaaacttctagaacaaattttttgacttggttgtaaaattgaacaaagtatttgaaaaattgatgttaaagtaaagacaacaagttcttctacaagtttcctctaaattaacatctaaattaagtgattgaattgatcttgacatatgataatctgataatgttaaataaacttcaggttcaaaaccaaaaaatggatctctttcattcaatttattatcaataattgaatgatagattgaaataaatgctaatgaagtgaaaacatgatataatgattcatataatggagaatattctaacataatcattattaattgaatacaaaatttgtcttttgttaagataaatggtaaattatttgtacaaaatttttgaattttcatatttaattcaaaatgacatgcatatgataagaattgattattaatatgtaaatttgataaatatgaaaaatctaatgaaggagttatgaacatactattgaaaattttattaaagttttcatcatttgaataagaatttaaatgtggtaatctaactgaatgattaagtttatttttttcagcatttaatgatttcatatcttgaaaaaattgattattaaaattattattattattattattatcaactcttttgaaattaatcgatggttgtggtaatataaaattattttttgtagggttttccgattcaactgtatcatgtcttttacgactaaacttgttttgaatttgtgtacaaaattcttcatatttattatccagatgttttgcactgtcaataattgaagaaattgaacttcttttataaactactggttccaatgaacttattgaatcagtaaatgatttttcagaagttgatttagtttcatcgttattgttaatatttttactattttcattactgacatgattatatttcctccattccgaattgtttatatcgattaaattttgaatattattttgctgtaagtaatacattgaagagttatccatattaatatttttattggtattcgcattagtaatattagtattagtattagtaatattatgattattactattttgacttgaaaattgtagcagaccattattatagacataatttgaagattgatttgaatcattactttcataatgatacattggaagtgaatatcttaaattttcatcactttttggaaaattattcatattaggtacacttttactcttcattaatgatgaacttggtaattcaattgatgatgtttcattaataatagtattattagattttaagctttcattatcatttatgtcttttcctttatccttatctttttttctttatctttatctttataataatttctaggtaaaacaggtaaataaacacattgtaaatttcttttctcacatctaagacaagttggtttaccttcatcacatttaatccttctctttttacaagatgaacaacctgttttagccttcttatgaggtttcctcatgaatgacatatttaaagtctgcttatatccctacttataatataataataatacttatatgaaaactatatatactatatgcaaaaggaagaaataaaagtaagataaagtaaagtaaaataaaagtaaaagtaaagagatgaataagaataaagatgtaatcaaaaccatcaggttctttaagagattcatcaaatcttgaaaataaccagttttgacaaaaaaaaaaaaaaattaattcaatttttcccaccaaaattgccgatattgtttcctaaattaccgcttttactctattccttggcaccaccatacttatttctccattcttcaatattcttttcatcaattctattgaataaatattgtggtttaccaatacaatgacctggttgaatccacatatcaaattcatcaggtatacttaatttatttgcatttaaaatttcaacaattttatctctaatatctggcatatatggtaccaataactgatgaaactaaataaactaaattaataccaataccaacaattgcatctgccttttcaggttgattttcatatgttgaattatctaatttattttcttgtaaaaataaattacctcttgaactaatttgcattgcagtttctaaaccttttcttaatcttgaattttccatatcatcaataaatgttgataaaagtaaatttatttcatcctttgcagtttcaatataatttggacaattttcaattttaaaatttggtataacaccattatattttgcattaacaaatttaacaattctattaacaaaattacctaaattagataataattcactattattctttgtaacaaattcagtccaagaaaattgtgaatcttgattttcaggtctaactgaagctaaataatatctccaaattgatggtgaaatacctgtatccttagcattattaccgaaaacaccaacatttctagattttgaaaatttaccaccttcatattgtaaatattcagttgtatttaaatgatgtaataaattccaattatctcttgtaccaatttcagttgatgggaaaacaactgtatgaaatggaacattatctttacccataaattgatataatttaacatcattttcaatatcttcatcattttcctttttccaccattttttccaatcatcagtataattagcagtaattgaaacataaccaattgttgcatcaaaccaaacatataaaactttatctttaaaatcatctaatggaacaggtgtaccccaaactaaatctcttgtaatacatcttggttttaaaccttctcttaaccaagaatttgtaattgttttagcattttttgaccatttaccttcatttgaagatttttcaacccattcctttaattcaggttctaatttatctaatgaaaggaaaatatgttttgaatcttttggaattggagttgcattatctaatttacatcttggattaattaattcaaaaggatctaataaattaccacatttatcacattgatcacctcttgcatcttcataagaacattttggacattcaccttcaacatatctatcagctaaataaccattatgttcaggacaatataattgtctcataacttgttcctctaaataaccattattatataatttcatgaaaatatcttgagcaatttcagtttgcttttcagttgttgttctaccaaaataatcaaaaccaattttaaaccaatcataaacttctttatgaattttatgatatttatcacataattcctttggtgtaactttatcctctaatgctttagtttcagttgctgtaccatattcatcagtaccacaaataaataaagtattataatttctatctttacaataacgtagagaaaatatcagcacttaaaactgaaccaacaatattacctaaatgaggaacattattgacataaggtaaagcagaatgtaattaaaatattacgttcacctttaattggttttaatttttcattttcatttaattttttaataaattttgtatttgatttaaaattagttttattattattaatttgaggaattctcttcaattgagtatttttgaaaacaaaatcaattactggttgaactttagatttaaaatcatttaaccatttaaattttgataataaatcagtattggaatgaataagagcataaattgatgagaaagtaattatttgagcaagtatctttagtattaactatcattaaatgaagaaattaattcattaatttcagattcattaatattattatttttcaaataactgtataattttgattcaatatttaaataaactaaatctttatcaaaagttgaagttgataaagcttttcaaatatttaacaattgtatttgaatgaaataaatggaaagttaggatgttttgaatcaagtaagattgcatttttagaattattaattgaactagttatcgaataaatcagttataattgaattgtataatttattatttaattcatgagatgaaattgcaattttaagattatcagctaatgcaataggagttgaattctttattaagataaagggagtaagacataatgagatggttgtgtcttaaaggaaagaagatgaaggaataaagagaagggatgattataattaaagagatctgataaagaaggttaaaaaatgtggtttaaaaaattaaatgcatgaaatttcgaagttagaataagaataagaattgaaatcagtcagtcagtcagtcagtcagtcagaacaagatataatataagaaacagtcccaccgacgctagagtcccatcgaccaggagatgaatttatttttcctaattgaaggctcatcaattgaataaataatttcggtggcgtcgatgagcctttgaatttcctccttctttttattttcactctgtaatgtgttatttaattgtattattgtggtattaggtaatgggattgtacttaaattagtaggtttaggtctataagtacaattgatattatatgcactatctacaggtatagatagattgatatagttaatgttattattattattattagtactgttcattgttatatacagaatacataaaagaaagaagagtaagtatataagagaataagaaataagaataagaaatagaaatgaaatagaaatagaaatactcaataagcaataagcgcgtattataattataatagaagatcgtatatttattgccgtataaatcttatcttatctattacttattgaactttctttgatacaccactggatttacccttagatttggttttattactatcttctctattgattatattagattctgcttgtgctaatttactctttaattcattcattaaaaatgtagttttaactctatcatcttcatattttgcataaaataatccactttgaataactacaatacctaataataaaaatacatttataacttcacttgctgcaataactgataatccagtatattcatcaacatctccccattcacctgccttgtgctgaataaataccaaatctaatatttgatacataacaacaaactgctaatatataaacaataaatgatccatattcaaaatattgaatatcaactgctggtctgaaaattttaattgtaaatcctaaaaatccaaaacaaactaactccatacattgtatatggtataaattttggtacttccaaccaatgtaaataatgatttaataataatttagttgaaatttcattattttgataatcattaacccataaaattgcatgtgtatatggccaattactatataatatacctaaaaaaaatgtgcatgatgtaatacacatcaatgtagcaatagtaactaatgcatcatatcttgaggacattgtttacttaaagaaatatatatataataaaatagaaaaagaagaagagataacatcgattacaatactaaatctcatcgcaacggcgaaatagattccttttatagtgaagaaactgctttttcatttacaacctcgaattttcacctttttcacctttttaccaatttttaactattatctaatgccttaggactacttctttactatcttgatctctttattggtcaactaatcatcgtatcagcttaatgtcatcgaatcccaatccttcatcaacatcaaataacccttctgcaattccttcacaacaacaacaacaacaacaacaacaacaatcatcatcatcatctaatacacaacaacattcatcaaatgctcaatcacaacatcaaaatcaacatcaacaacaacaacaaccacaggaattaccattcaatttaaatagattagtccaagaatatcttacacgtaaaggttatcatcaaactgaatcaactttaagaattgaatcaactaaaataccaggttctcaaaatataaatttaacaaattcaaatacaaattataataaaccttcaactgcaacatctgaacgttcaaatttacaatttcaattacaaaaatttaaaaataatcaaaatatttcattacagagacaattcgatgaagatccaaatatttatgctagatcttatttactttatagaacttggtgtgataattctttggaaatgtataaatatgaattgaaaaaatttcctttatcctttcttcatatattcttacttggcattaattgaaagaaatgaaactaaaattgctcatgattttcttttaaaatttaaatctgatcatattttcaatcataatgaagaatttaaaaatttattgaaaaattaatttacaaagtcatttaaatgaaaataaatttgctaaaatttttctttcaaataaatataaattaaatatttcaaatacttcattaaatttaattttaggttttattaatgaaaatcaagcaattggtggtggtatattaattagatttttaaataataattttgaaattaatacacaaattgaagttacaacttcttcaaatgatgaaaattctctaagtttaaataatttagaaagtatacctgaaatttatgaattaatcaatttaagtaatgataaagatgaaacaactgataatcaatttaaatcatcaaaatcttctttcatatcaaataaagaaaaacctttaaaattaggtccttatccacaagatgaagaatttacaaaagaattagaagctgaattaaagcatagagatgaaaatgctaaaaatgataataataataataacaataatgaaaatgatgatacacctaagaaaacacttatggaagaatataatgaaaattttaaaatcgatccaaaaaatgataattccccagcaaagaatactttgccactacctcaaaagacagtttatgatttaaaacgtgccattcaagaaattcatgattcaagatcaaagataaaattatcatcagcttcatattctcatcttaatgctgatccaaataataggaaagtttatatttcacaaccttcattaccttctgtttgtatgtatacatttcaaaatactaataatgatcttaactcattagaatatcatcctgattatacaatgattgcaggtggatttcaagattcttttattaaattatggagtattgatggttcaccattaaaatcagttttgaaaagtgatcctcataattataataatgttaatttagaaaataattcaactagaagattaattggtcattcaggtcctgtttatggtatgtcattttcacctgatggtaaatatttactttcatcatcagcagattcaactgttagattatggtcaatggatacttatacatcattagtttcatataaaggtcatggaggtgcaggtggtgcaggtggttccaattcacctgtttgggatgttgaattttctccattaggtcattattttgcaactgcttcacatgatcaaactgcaagattatggtcttgtgatcatatttatccattacgtatatttgcaggtcatttaaatgatgttgatattgttaaatttcatccaaatggtacttatttatttacaggttcaagtgataaaactattagaatgtgggatattgcaaagggtgaaagtgttagattatttgttggtcatacatcaccaattaatgatattgcttgctcacctgatggtcgttggttagcaacttgttctgttaatgaagaaaattatttaaataattcttttggtgtaagtgattggactaatagtattggtggaggttttacaccaagtggtggtagtaatgataaaaatagtaatgatactaatgatgaatcagataagaatactaaggataagaatggtaaagataagaatagtaaagataaagaaaataatttatcaaagaaaaatggttcatcatataatgaaggtaatttatcatttacaggttcagttattcatgtttgggatattgcatcaggtagaaaattgaaaacaatgcgtggtcatggatctggtggtattcattcattagcttggagtcgtgatggtgaagtattagttagtggaggtgcagataatagtgtacgtgtttgggatgctaaaagagatacaattgatataatttcaggttcacgtcctgaaacttttaacacaaatagtaatagtaacaataatcatgtaaagggtgataataataagggtaaaaataatgttaaatttggttcagatgatcatatgggagtttattttactaaaaagacaccgatttataaagttgaatttacacgtagaaatttatgtcttgcagctggtccatttatgaaataattactgtataaataataaaaaaaaattgtattattaactatgttaattaaaaactaatctcaaaatttagaattaacaacaggttttgcaatatcccaaggaccttgtaattcatttttatatttttgtaatgttaaaaaataccaaggtccaattataattatcataaaatgtaatgaaatccaagttataaaccatccataaccaaataatttacaaactaatgtatcaactgttacaattattaaaatcatttgtaaaagatgaaattcatttaatttacaacgacgtgtaaaattattaaatgtagggaataatccacataattgaattgcaaataatataaatgaaaatgctgaaatattagaatttaatctagatgcaagtacaattgcatttgaaactgcaatatttttagaaatattagaatttttaatttgttgattaaataattcatttaatttaatattattatgaaaaattggttttaattcttgttgattgtttgaattataattatttaaattaattgaagaatttattctagatggaacaggtgatggagatcttgaattaaatggtgtttgaaataatttattttgataattattaattaataatttttgccaatgtaatcgtttttccttaattgataatttagggaactcaatttgataatcattaaataaaatattcaaaattgataaccaaccacttaatgcccaaattgaatcagatgatgttgaatttgttaatgatttaagaactggtgttaatgttaatatataaagtataattaataatgatgatttacaagtttcataaaaatttggtggtgatggttcagttaaatattcttccatatttaaaatatctgattcattaatttttaaatttggtactaataataaatttggagttgttggtatattatataattgtttaattttaaattgttgtaattcaattaattctttattcctccttatattaagtgtaactgtataataaataaatccaattattgtcattgttgtacttaaaattaactggtttaattggattccaattaagttgataaattccataaaaaacaacaataactgacataattaatgataaatgtaaaacaactaatgaaaaatcataaacaagttttgtatatgaatattgaacaactgttgaatttctctttaattgtgaaaggaaactagcatctgtgtaattatcaggatatggttgtttaagccataaaagtttcttccatcctcttacttttgaggaagattgatcgcaattcggggataagttcaggtttactggatattattatcatctcatcatcatatcactattattggtactggtattaattataagttttattggtgattgctttttagaagaagaccttcgtatgatattgtttcgtaatatgttgatatttaactccttctcatcttcagatgatgacatttggtttgtttaatgtgacagatcatcaccagataaaaataacgtagattcatcaacatgatttacaaaacttgcggtatatgaaataaaattcatgtcaccaaaattcaacggtttttaatgtctttctttctttatctcttttctatctattatatatacaatctaattttattataaaataataaatactggttcattaagaaccttcttgttgtttcttaacacgtgcttccataagatcatttgctttctttcttctggcctcagctattcgtctagctctctcttttctcaaaacactttgttcacccgttaattttaactcgtttgctttatcatcttctattttttgtaaataagcttgatagtgttgatccttctctgctcctccaacatcgtgaaattttatattacaactatctttactattcattacccaattgtcagtaattggattacatgtacattttgctttcctacgaatattatcatctaatgggcatatagtaccaactgtatgttcataactgatatctttaaacaaatgaatttcattcctttgtaatattaaactgaaagataattgaatggattaggtgcatccccccatctttcataaaagaatccacctgctttatctaaataattaacatatccttcataaatttcattattataaatacttaatgatgcaatttcaaaatttgaccaataatgacataaattataagtttctcccattatcatcacttataaattcactcaaattatcaacttctttactaaaataatctttacttaatgaattaaaatatttcttacttgtttcccataatgtttcaattgtgttatgtaattctctcattgaaattgtgaaaccatatttaataccttcatcttttaaaaatttaaatggatcttccataatatcacaatggaagttaacatcaggttcaattctccaataatattcatattctctcataattggatgtttatagaaaaacattgaattaaatctacacatatgtctataactttcacttgtaccataagttattcttgcccattttctactctctctaacttctcttgccttatcttcatcaatataatcaggataactccaatattcccttggtattaatccatatctaactctaccactaatcatattacttgttaaagttataaactcttcatcaaatggttcatcattgagaaagacccaatcatatccaaatttattattaaatcttgattccacttgatgaattgttttcaacattgaatacatttcactatttcgacacagtgtaaataatgttgcattttgtctcttatatttaatttctggagtatttattattctttctaattcatattgtgcccaaggtttattatctggactcgtgtctttcctaattttatctttattgtccaataatgtaccttcaactttatcagttccactggaacttacactttttttattttttgctgattcatttaaaatgtcttgtttttgttttattttctttaatgcatctgtaatttcatcatctgataatttggcaagttgattaccaaaatcttttggattctcattgtatattctatcaataaatttttcaatatcaacttcttccctgtcgatttctttgtcgttattcttcactcctgttggtaatattttttcattaacttttgtttgggggacttttccattaatcaaattatctttcaaaattatttctttaggacgatccctgtaactttgacacatttctaataaccaataaaatagcaattgtcagaaatgaatagactaataaactgttaaactttttagtcaaacgcatattattaaacgagaaaccagacttgtttgtctaatatgaacacagaaacaagttatttgcttaataaaaatataaacaacatacggtccctaaccacatataatatataatatacatgtgtggtgtagactgattaggaggcttgaaatagatttaatcgatgaactggtggaaaattcagaaattcagtcggttgctatagtttttgccggtgggttatagacggccgagtttatttgtttttcgtgggagatgttccaggtatgttgcccataaaagtaccaggagttggaatatataaatagattaatagattcgttaataattaagttgatataaaataataaatttataaaagttcacattcagtcatttaagcccaagctttgaattgattaattaaaccttgagtacttgcatcatgagttttaacatcaccttcagtttgtaattcctttaagataacttttgctaaaactttacctaattcaacaccccattgatcaaatgaattaataccccaaattgcaccttcaacaaatgtaacatgttcataataagcaattaatgaacctaaagttgcaggagtaattttttgagctaaaattgaagttgttggtctattacctgggaacattttatgtggtactaatgaagattcagtaccttcactttcaacttgttcctttgttttacctaacattaaagattctgcttgagcaaaataatttgaagctaacataagttgatgtttattattttcaacaggattatgagattgagctgcaagtataaaatcagttggaattaatttagtaccttgatgaactaattggaaaaatgaatgttgtgcattagttgttggttcaccgaaaagaacaacaccagtttcataattaacaaatttagaatcttttgtaactgatttaccatttgattccattgataattgttgtaaataagcagggaatctatgcatatattgatcaaatggtgcaactaatttagtttgagctttatggaaattattataccaaatagttaaaagaccacctaagaatgggatattttcttcaattggtgtattaaggaaatgattatcaattgcttctgcaccttttaagaatttatcaaaattttcaaaaccaatatagatacaaattgataaaccaattgctgaccaaactgaatatctaccaccaacccaattttcaaaaccaaacatatttttagtatcaataccaaatttagcaacttcttctgcattagtacttaaagcaacaaaatgtttagcaatatgagattcatccttaacatgatttaaaaaccaatttttagcagtaactgcattagcacaagtttcagcagttgtaaaagtttttgaagcaataaggaaaagagttgattcaggtttacaattttttaaagtttcaacaatatgagtaccatcaacatttgaaacaaaatgaactttaattgattcatgagcataatgttttaaagcttcagtaaccataacaggacctaaatcagaaccaccaataccaatattaacaacattaagaattttttcacctgtataacctttccaagaaccatctctaacagaatcagagaattctttcatatgttgtaaaacatcatcaacttcattagctacattaacaccatcaactttcatttctttcattgatctatttcttaaagcaacatgataaacagctctattttcagttgtattaatatgatcaccattaaacatttcatttcttaatttttcaacatttgcctctttagctaattgaattaatgaagataaaatttcttcatcaattaaatttttagagtaatcaaataagattttagaattatcgaaattagtgaattcatgagagaattttgaaaatcttttaggatctgatttgaatgcttccttagttgaaaaagatttaccctttgattcatagagtgattgtaattgattccaagcgtctaaagataatggagatttcattgtaattgtaattgttaattaatcgagttaataaagactacaattcaaaagaaaacaattattaattataaaaaggaaaacatctaatgatacagaatttaaataagaaaaaatgagaagacatgtcagaataacggaaatgagtggtcctctcccatgaagtgtccctattaggaaggttagccgaaatatacttagttaagtccacgtttaaaccttaaactgtctcttttacgattagctgttgcattgtatagttctgaatctgctgctgctgatgatgggggaggagtggtgtttgtagtaggagtggttatattggtagatgtaactggtaattgaggtggtgcagaaaatgctaatggagatgggaatgattgttcaaatggagacatcatatctaatggagatgttatatgatttaatgttggattatggaaagtatttggatttgaatttgtagttggtgtaagattaaaatatgtaggacctgcctttgtaaatgaacttgatctaacacctcttggggttctagcagatggtgttgaatttgattgttgatttgatgtaaatgatgatcttttctgtaaaaatgttggcatattaagattaagtgatggacgttctctctttgttgcagtttgtaatgcaactggtggtggaggttgtaaatgttgtaaattatcatcatcattttcatcaatttcaggattagtttgatttaaatgaatactatttatttgattatttatcatttcttcagtgttcatattattattattattattattataactgctataattattattattacttgacatattgtaaattggtaattgaattgaatcagttgacatcatattaattgaattaaaattaggcataactctatcattaactgaaattgccgatacaattgaattagttcttgaaattggtaattgatccatcatataagaatcattaccattatttgaattaacattacataaatgaattaatcttaatcttaaaattgttaataaaagatgaatatttgattcattaagtaaatcatttgaaacatctaatctgtgatcaatttgaattaatggagtagatgatgatgatgatgatgatgatgataataacttattttcatagaaaagttttgaaactaatgataaaacacctgaaggtgggaaacgagaatcaaatggtgtaatattaggttgatgtgcatatgcgatataataactatataattcatcatcgaattgttgagtgaaattataattatctaaatgaggttgtggcatttcagaatagatggaagatgaaatggaaacattagaattttgtctattcctaaggaacattggttgtgaaatgggattattattataagttgtattaatactcatacaagaatctgttcttaatctattaggtctctgtaaattctggaaattatctggaaatctatcaggagatctctgtattcccggatttggtatatcaccattattagaagtagtgggggtaatagggtatggcattttctagttgagtagatgaatgcaggataggtaattatcaaagaatatatgcatcagtgaaagtacgtgtaccgttataatattagggatcggaactctagggaaagaaaattgcgaggaaaatttgaaaatttggaaatttgaaagagaggaaattgaaattgggttgttggtgtggacaactgaggttttaacactgtgtaggaagtgtttggctgttttattaggattattgattattttatctgttatatcacatagtatactccattaatcagtcatgttggtatctactaaagtcattgaacttaaaggtatgtattatacactattttaattgtcattgtctttattatatgttatgttttgatgatttcatgcatatcatcatataataattgactttattacaaatcaaattaaatcaatttaaatctacaaaacattcatactaacaattcttactttccaatattctattacagcaccatttaaaaatacacaacaaacacaagttgttgatttaaagaatgattcaaattctgcaattgcatttaaggtaaagacaactgcaccaaaatcttattgtgtgcgtcccaattcaggagttttaaaatcaaatgaacaaattcaaattacaattattttccaaggattatcagatgaacctcaattaggttcaaaatgtaaagataaatttttatttgtttcagtaccatgtaatgaaattttagatcataaagatgtttcaagtaaatggagtgaattagaggcacaaaatggtggtgtttcaagtgatattaaagttaaagttgtctatgattttggtacaatgaatacaattgctgaaaagagggaagaagaaattgaacaacctgtaattgaaaataatattcaaagagaaactttaccagtagagaaatcaatacctgtacaagataataaagaaattcctcctcaacaacaacaacaacaacaacaactacataataaggaaattattgaagaaaatgaaattaaaccaacaattacaaagacaactccaattgcaccaccaacgagcgtcccaggtaaaacatcaacttcttcaaatgatactcttttttacattattgctttagttttaatggttattgccttcttaatctctcgtattttataatcaattatctaaatagtatattatataataatataattagtataactgactaactatctaactcaatataatggtatcctgtcccatatgtttaagttcaccaactaatgcagtcgctacaccttgtggacacattttctgcagtaaatgtttatatagagcattagcatcatcaaatggtaataatggatcaactaatagtacaaatgcacgtaatggattatgtccagtttgtagaaatcatgttagttataaagatattgtatggttacaagttaggatacgacaataataagtgaatatgatatgatattagtatttatcgaaagtacaatttattttcaaattattatatattcataccatctttaataataaccaactactctgtataaataactactctttataatgtataatactaacaactctccattgaattgcttccttcaagtatagacatcaccaatagacagtacaatagacagttaccaatagaggatatgtattcattagacgcgacgtacagaaggtattaactgtttaagaggcttgtttcatgctagaatgcatatattgattaatgggtgttatatatcacttaaactatacataggataatgaagaaagcacttataataggtattaattatactggtagtcaaaatcaacttagaggatgtattaatgatgcatgtacaattgcaaatttacttttagcaaatggatattcccaaaatgatatggttgttttaagagatgatatgggtggtatggatgcaccaactaggaataatattttaagagcaatgcaatggttagttcaaggtgttcaacctggtgattcattatttttccattattcaggtcatggaggtaaagttaaagatttagatggtgatgaagatgatggatttgatgaatgtatttatccagttgatttccaaattgcaggtccaataattgatgatattttacatgatataatggttaaaccattaccaccaaatagttatttaactgcattatttgattgttgtcattcaggttcaatgctggatttacccttcatgtatagagcaacagatggtggattaaaggaatattcagtattaaagacagctgcacctgcgacaatggaattatttatgggatatacaacaaggaatacaggacaattaattgaaggagctaaatcattatttaatacagctacaaattataaaagtacatcaaagagggaacgaattaaacaaatgaaaagttcaccagctaatgtaatttcaatttcaggttgtagagatgatcaaacttcagcagatgcacaaatgtcaaatcaatttgcaggagcaatgacttatgcatttaatatgaccataataagtgctagacaacaattaactttgttaacacttattcaaaatatgcgcgctcatttaagtggcaaatattctcaaaaatgtcaattatcaacggctcaccaaattgacccaaacactcctttctttttctaatttagtaatttgatttgtatatcagacacacaaccaacgatatggatattgtagataaattcatatcttataatcaacagggtgtagatgttaaaattcaaaatgatttacttaattctttaaaagaaattaatgaaaaatctttaaaggataaaaataatagagaaaaaattaataaaagttggaatgaaaacaatgaaaatgttgatttagatcttttaaaatctcaattattaggttttaatttattatctcatgatgttgatttaccaatagaattggatttagaatatgttaatcctaattataatgaagaaggaagtatcaacaactaatgttaccaatgataatgataatgataataaaataactttaccattagatgattataatgcaaaggcagaaatgtttggtattaaaccttctaagaccaacagtttcaaaagaatttaattctgttggtttaaatgaacttgaagattcaattaaattacaaattgaggaaagaattgcaaatttacaacaattaccttcaaatttaggttcaatagattttaataaatttgaaaatgatttacgtttctcaaatgatcaaattattgataagtattgatagtttaaaaattgatgctttagttgaattaaaatctttaaaattattaccattacaaaagcaaattagaaatcatttattaattaaagttgcaacaaatacaatttataatgatgaaaatttaaataattattcaatttttaaaacttggaaaagaacttattgtgttcatccaaaacaaaaaattttacaaactgctaaattagctgaaaaattattacaacaacaacaaattgaaaaacaacgtcaaattcaattaattcatgaaaataaagttaaaaatttatcaaatttatcaattagaaaaacaaaatttaattagtaataaacaattacataaaattcaattagctagaagtatacatcaatttcatcaacaaactgagagggaacaatctaaaaaacttgaaagaaatgcaaagcaaagattacaagctcttaaggcaaatgatgaagaagcttatattcgtttattagatcaaacaaaggataaaagaattacacatttattaaaacaaactaattctttccttgattctttagcaaatgctgttaaagatcaacaaaatgattctaaaactcataaatcaattgttaataaacaaattgttgaagaaaatgaggaaaatgaaggagcagatgaagttgatgaagaaatgaaaaagaaagttgattattatgatgttgcacataaaattaaggaaactgtcattaaacaaccatcgatacttgttggtggtacattaaaggaatatcaaattaaaggtttagaatggatggtttcattatataataatcatcttaatggtattttagcagatgaaatgggtttaggtaaaacaattcaatcaattgctttaattacttatttaattgaaaataaacatgaaatgggtaaatttttaattattgtaccattatcaacaattacaaattggacattagaatttgaacaatgggcaccaagtttgaaaactgttgtttataaaggtacacaaaatcaacgtaaagaattacaacatcaaattagaatgggagattttaatgttttattaacaacttatgaatatgttattaaagatagaccattattaagtaaatttaaatgggctcatatgttaattgatgaaggtcatagattgaaaaatgctaattctaaattatttataactttaacaaattattatcatacaaataatagattaattttaactggtactccattacaaaatagtttacctgagttatgggcattattaaatttcattttaccaaaagttttcaattctgttaaaagttttgatgaatggtttaatacaccatttgcaaatactggtcatcaagaaaaattagaattaagtgaagaagaaagtttattaattattagaagattacataaagttttaagaccatttttattacgtagattgaaaaaagatgttgcaaaagatttacctgataaagttgaaaaagttattaaatgtaaattttctgctttacaattaagaatttataaacaattattaaatcataatgcactatttattggtgaaggtagtcttggtgcaactaaatcaggtttaaaaggtttaaataataaaattatgcaattaagaaaagcatgtaatcatccatttgttttcgaagaagttgaaaatattgttaatcctgaaagactgacaactaatttaatttggagatgttcaggtaaatttgaagttttagatagaattttaccaaaattaaagaaaactggtcatagagtattaatttttttccaaatgacacaagttatggatataatggaagattatcttagatttaaaaatttaaaatatatgagattagatggttcaacaaaggcagatgatagacaattaatgttaaaagattttaatgaaccaaatagtgaatatttttgctttttattatcaactagagctggtggtttaggattaaatttacaaactgctgatactgttattatttttgatactgattggaatccacatcaagatttacaagcacaagatagagctcatagaattggacaaaagaatgaagttagaattttaagattaattacaagtgaatcatttgaagaagttattcttgaaagagctcatcaaaaattagatattgatggtaaagttattcaagcaggtaaatttgataataaatcaagtgcagaggaacaagaagcatatttaaaacaattaattgaagcagagaatagtaaaaatgatgatgaagaagttgataattatgatgataatgaaattaatgaaattttagctagaaatgagactgaaattgaagtttttgaagaacttgatgaggaaagagttattaatgataaaaatgatggtattaaggcaagattaatgaatgatgatgaagttccacaagttttcaaagaggatatgaatgatcatttacaaaatattaaagatgattcaattagtggattaagaactaagaagaaagttttctatgatgatggattaactgaggaacaatggttacaagcaatggataatgataatgattcagttgaagcagcaattgaacgtaaacgtaaaagaattgcaaaattaaaacgaactaggggtatagttgatgatgaagaagatgatgaagatattgatgatgatattgataaagttatggatgatgatgatagtgatgaagaagtttatgaggatgaattacctgcacgtaagagacaattaatgtcaaggggtagtacaccaagaaataatacgccaagacctagtgcaccaaagaaagttaaaccaccaacacctgaatggataattaagagtaatgaaatgttaaataaattggaaaatgtttatgatgaggatggtaatgatgtttccaatgttttcattaaattaccatcaaggaaattttttgcagattattttaaagttattaaaaatcctgttagtattggacaaattcgtaaaaatattgaaggtaaaaaaattaaaagttttgaagaagttattgaattattaaaattaatgtttgcaaatgcaagattttataatgaggaaggttcatgggttactaaatgtgcagaattagttgagaataaaatgaatgaaattttaaaagaagatgaagaaaaagagaaagaggaggagaaggaagaggaagatggggaggttaaggatgaggaagttaagcaaggtggtgatgacgatgatgaagcaaaggatatttaaattatattatatattacactgtatactaagaacaaacattaaactatagattagagtaaagacattgtagtattctcattgcaaacttgtttatcaagttaaattgaggtatagacgatgcgtctggtgtgttattatcattaggattaacattatgtaaataaagtaattgataatgcataatgtcaatagatgaaggtaatgtatgatgaattatttcccaatgatgattatcatcctttattgaagtatattcaagtataatataatgagttggattgaatttcttgtatgattgattgaaaacatcgaatctaatacctaattgattaatattattatcaataggggaaaactgtaataccattaaatctatttatattttcaataaaaattaaattttcgatattatttggtatattttcattttcatattcatgttcatattcattatatattgtatttattaaattatcaaatttagaataattatttatttcatcattaagtattttaatttcattacgtatttcattcattgttttaaaaaggagagaagaagtaaacaagataaataaataaattatggaattaaattattggaaatttatgcgtgaagctttagaatttggtaatattgcattaattaataatgaagtaccagttagtgcaattttagttgataatgatagtggtaaaatatggtatagagcacataatatgacgaataaattaattaatggtacattacatgcagaatttcaaatttataattatttattggagaatgaaaatgatcatttaaaaatatggcaaaattcaacattattcgtaactgttgaaccatgtattatgtgtgcatcaatgttagatcaagtaggtattagggaaagttgttttcggttgcccaaatgaaagatttggtggtaatggtagtgtctttaaaattaattataaatcaaattataaaattataccaggtgttggtcataaggatgcaatttcacttttaaggaaattttatattggtgaaaataaacataatccaaattcaattaataaaaagaagagagtattgaatattgatagttttccaattttaaattatgaaaaagtatatttcaagagatgaatttataagtatttggggggttgaaaatgtaaagatatttgataataattattttttagaatttaatgataatggagaggtattatgtgatgatggtaataagaaggtaaagatatgaactagtcatcaagattttgatttttcagtaaattttcaatttctaatgaattttgttccatttcattattattaaaatacttatcaattttataattatcatctaatgaattattaaatcgtattttatcttcatcggaattagaattattattattattattattaaaattttcccaaatttttaatgaattttcatataatttacaatattcattacttaaatcatttaatgaatcatttatttctaaatctttaatattttggaaatttttccattcattaagtaaatcattttcaaatttttcataaactgattttgaatttaaaatttcactatttaataattcaattctttgatttaatttatcaattctatcattaattaaagttgtttcatttgaattagaattattattatcattattttcattatttttgaaaaattctaattttttagttataaatgataaagtactttcagttgaagatgaaattaatgaaccaccattttttaaattatccctttcattaattgttttctctaaataattatttaacatttcataatctaaaattttataatcttttaattttgataaattattaaaacttataatataatgttctaaatcttttaaattatttaaataattaaattctaaaaatttatttatttcaatatattgattacttgataatgataaattatttgaaaataatttaaatttttcaattattaattttgtattattatcaatttgatttaaatttctaaatttaccattataatcattattaagtaaaacacttaatttattaaattcatcactgaaaagattcatctcttttgataataaatcttgctttgatataactttattgaaaattttatcgaatttaattaaattttcatttaattttgatctattaaattcaatttctttaaaatttttattaaatttagtttctgtatttatcctttttaaatgaattcattaaataatcagttacattttcaatttgtaaatcattattattatttgaattgtttacctatattaatattttttttataattatcccaaatattattatcccttcccgaggaatataaggaaaatttcacaatttgacaatatcgggtgatttaatattctcttaataaataaattaagtgaattacatctctttgttataaattcatttgtaaatctaccacctttaatatattctaatctttgctttgttggtaatggaggtataagtaaagttggataatcgaatttaagacattttcttaatatatcgaaatcagaatatctatgattaattgtatattcaattgttgtattattgtctttattagttaatttaggtaaatttgaaataatttgtaaatgataatttacataaggatttgaatcatttttttcaagaattgggtcaattactgaaactttgagtatatgattatttgaatctttaattaagacactgtcattggtgttattaagcagtacagaagagaaatcagccattgccagtataaagaagagtgattggctcagctaataaaattgtatttgccactgagattgagaatattataattaacaattaaataattatatacatcttacgtaatactatattataaaatccagttaagtggattatgaagagttcttaaagtgttatcatcactgttgtattcaatgttcttacaatggggtaatgccttccttgatgagtgattcatcaccttgggagaagtgttgaattctttggaattgactgataaatgataattcaacccatccttcactgttcatatgtttacgtaggtaaatatctttaagtaaattagatattgtgaaataataatcaatttgaaatgcaattgagttaattgcaaataatcttatattagttattgttgttggtatgtgtatggttatttctatgattatttgatctattattgtatcttctattaggttttttttcattattattagtatggttatttacttattattgttatgtacaggttttgattcttttgtgatggtaatatctttattactatctttaatgtctttaatgtctttaatgtctttttctttattattattatctttttctattatcttatgattaacagactttcttctttgatggtttcttcttttgttttctattgtttgaagatgaaggtttcttattagatggtgaagaagaagatgaagaatgatgatgatatttttataactgcatcagtataaggtatccatttagtattagagttagatatagaagtactactactattatgactactgttgttattattattgttagacaaaagagataaatctatagaagcaatagtatcaactggttctaccttccacactgacattggtgatatataccaaactaaaaaagaaaaggatcaaaagaaaagaaaagaaaagacataaaataaaataaaataaaaaaattttccaaatgaaaaaaataaaaataacttcctcactgaaaataaaaaagcgtgttttaataatttattatactgtaccgtatactgttattattattattattattgttattattagagtgttgcttcatttccattatcatatcagcctcctttgtatcttttctttcttttgtatctttcttcttcttcttcttcttttgtatctttctataactacaccatgagagtaaatggacatgctaagttcctcttttacgctcatctaatcttagcggtattccttatctggttcttatttgatttaataaccctcctttatgataactcaaatcaatttgctctaactgataatgatttaaataataaagatttcatcaattctcaaactcctttaatacctaaaattattcatcaaacttataaagataataatatcccaaatcattggaaaaatggtcaaaaaaattgtcaaattttaaatcctgattatcaatatatactttggactgatgaaatggctagaaattttattaaacaacaatatccttggtttttaaatacttttgataattatccttatccaattcaaagagctgatgttataagatattttatactttcttattatggtggtatttatatcgatttagatgatggttgtaatagaaatttagatcctttacttaatgttacctgctttcgttaggaaaactttaccaacaggtatttcaaatgatgtaatgggttcaattccaaatcatccatttttcattaaggcaactaatatgcttaaggcttatcaaattaattggttagtcccctatattacaattatgttctcaactggtcccctattcctttcagttgtttggaaacaatatattagatggggtaatccagcaagtgcagttgttagaattttaatgccaaatgattataaaaataatgaaaattcattctttcaaatttcaaaaggttcatcttggcataatgatgatgcagctgttttattattaatgagtcatcatataattttaagtgttatattttgtactttattaggtattgcaattattttatcagaatatttcttagtggttttcattgataaaaaattaaatattagtacaaaattttatcatttattacattcatttaaaaattatttctccaattcatcatcaaattcttataactcattaaataactctccttatgctaatattgaaattccaagaaagacaaggaaagattcaaatttacctgctgctttatctgttgatttagagaaaaatgtttatattttagatgatattattgaacattgattgttatattatcatcattacaatacccttattacactacctatactctcctttagtcttttttactatctttttacttttacattttcattttcttttcttttatcagcatatcatatatactatactatatactcttataaaaataaactctctttatctatctttatttaaatgctttatcaatatcagttaatgcaactctatatttacatttattataatgacatttctctaaacctaatttacaattatcaattgacattggtaaaatttcaacccatggtttaatacctttgtcaactgctaatttaaacatttcaatcatttcaatatgactacctaaatgtgatgcacccataaaacatgcatttgacataaaacttcttggtgaaacagtaaatggagtttctggtaatccaactgaaacccatttaccattaatttttaatactttaaggtaagtatttaaatcaaaattttctgcactattagctgtacaaataactaaatctaattcaaatttaataaatttattctcttcaatttcatcaatccaattacctgttttactattacctgtaataataactttatctgcacctaactttaattgcatcttcccttttactatcatttctactgaaaacatatgtttcacatcctaatgctttagcaaattgaattgccatcatacctaaaccacctaatccaacaataccaacttttggcttttcacctcttttaattaaatcatatggtaaatttctaataattggtgaataagttgtaatacctgcacataaaaatggtgcagcttcctcatttgttaaaatttcaggtatatggaaaacaaaatattcatgaattctaacataatttgcataaccaccctgtgagagaaagttgttgaaccatcattattttgataaactccaccgaaagtatgaactaattttggacaataaatttcattattacttaaacacattttacatttcatacatgattgactttgagctccaactccaactctatcaccaattttaaaatctttaacatttggtccaatacgtacaactttcaccaataatttcatgtccaacaattaatgggaattgtgcatcaggatttcttccaaccatttctagctgcatgtgcatcagatccacaaattgaacatgttttaattaatatatcaatatcattatcttcaaatggttttggtgtataactatatggtttaacacttgaccatgtactctctgatggatcatagactgcatatcctgtaaattgttctggaacatgacatttttctttctttccttacttctttgttagctatataaatttctatctattctatactctattcatttctattacaaactatggggaatattaaccttatttatagttaaagttacttaatacatgttatcaaagcgccaattaccgcattgggtatatccccccatagacaagggccacactttcccaatacggtaaggttgccgatttatctcttattttacatgaatcaccattgtaatcaaaccttcctctaagacaatcactgttcttgatccattctctgtattgtcttctccatgtgtaaccttcaatggtccatatttgtttccttcgtgggaattctctattgagaatattatgataatctttttgtacgtaaactggtacattttcgaaaatttctaatttcatttcattaacttcatcaaattgataaaaatgattattcttacaacttaataaatcttgagatttaataagcatatcattatttaaattcttactctttaataatccataaaattcattctttaaatctttatgtatttttggaacaactttagttaattttctttcaatttcatcaacatttaaaaatgaaagttgcgtgatatcaatatacattccattttgaatatcaataaatctaccatcaattgtatttttcttattttcattacttctattgaaaaaattattattaatatcaattaaatatatacccatacctgaatcaaataaattatctttactaatatcaataattaatgattgattaaatttatttgccatttcccacatacttgaactactaatttgaaaatcatgatcaaaatcccatggtaatgttttattattaaatgaatgacctaataatgtaccatgacttaaccatgtttgaatattagcattattagtgaattttatccatgcttgaatcattttttgtaaaattgataatcttttaaattcattatcaatttctttaatattataaaatctccaatcataatgactaccaccaattaattcattattaactcttgtttcatggaaatatttatcaaatttttgaagtttaatttgattaagaatattcttatataatttattatttaatgaatttttgatttgataatttggtaatttatcttcaatttcattaatattattaggattttcaaaatcttcccttgataattgatatgttaatggtggtggaatattatgaataattctagctgtatcatagagtggattaatattagtatcttcatcgatgatagaatttaatatatcattaactaataaatttataggaggtaaatctacattattatctatggaatcttgggaaatatcattattaatgggtaatattatattggtattacttacaccatcaacaaatataagtctctcaggtgatggcattgaatataatgtatataatgcaccatgaacaattctaccttcaagattcagtgggaaatcatcaattggtttaattattttaaaatgtggataattaacattaattaattcatcaatattgataatatcaatacaatttgttaaattatcaatattccaattccaaaaattccatttattatttaattttgggaatcctaattcatttgaaaattcattacatgttaataatgtattaccattatgattattcagaaatttattacttggtaaaagtcttttatcaaaattaatccaatctttccaagagaatttatatttagataaataattaaatgatagtgtaccagttaattttaaagtttcacttaattcttgaagataattagcaactggaattctcggatcataacctaatttaccatatggtaatggggcactaaaatctaatgattttataatttgataagtttcatcatcattaagataatcaaatggatcataatctaaataatcccatttaattggtgaagatactgtagttattgaattataatatttactaaagattaaaaaaattgaaattataattgaaaatataataataaatcttttaataagtaatctatacctatttaatatcaaatatttagtcgtttgactataataatgaagagaagaagaacttttactatctattggactattataattccaatatttagcaattgatgaagttattgaactaattggtgaataatttaagtaatgaaattccttatctttatccttatatttaccatcattaatgttatcatcataatagttgtaatgattattagaatgatttaaattgggtatacttccaagttctttgtctatatcaaacaaagaaggagatcttgattgcattaaagctgttattatataagataaagagataacttaagaaaagggagggtcccatggagatataccatcattgaaaccgttggattatctaatatgctattggttatccccagattattatctcatcttttcttttactgtcttttatttgtatatgatgtagtgtataatcaacctattataactataacactcttataatgtctattacctttaattatggctattttacataaattactagttgtaatattaaaatctgtactttaacaaacaattattaaaacaaatactctacaaaaacattactttccaatttaaaaccaccatttctctcccaataaccccattagacaccataaccaccctttaaagaccacatccacacactcataaccatcacaacatcctatctacccctaataaacacccattcaatcacatccaccacaacaaaaaccctgtcatacacaccatatacaaagcaacacatagtaaatttcgctattagtactatcaactcattaagttaaggcttataactatatacaacatacacttcttttgggtttcatttaataactatgtcaaaacaatcatcaataaccccacaggaacaacagaaactacttgataattcaatttcaattattaaaagtgaaatttatcaaatgaggaaatgtttagataataaacataaattaatggatgctttaaaacatgcatcaaatttccttaatgaattaagaacaagtagtttaaatcctaaacaatattatgaattatatatacttatctatgatggattaaattatcttaccttatatcttaaagataatggtaataatagtaataaaaccaacaacaattatttaattgatttatatgaattaattcaatatgctggtaatattataccaagattatatttaatgattacaattggttcaatttatttaaataataaagatgcaccaattaatgaagttatgaatgatatgttagaaatgtgtaaaggtgtacaaaatccaattagaggtttatttttacgttattatttaattcaaagaactaaaaattatttaattaatagtgcatcatcaaatgatgataaaacaactgataatataattaattttattattaataattttattgaaatgaataaattatgggttagattacaatttcaaggtcattcaagtgaaagagaaaagagaattattgaaaggaatgaattaaagatattagttggttcaaatttagttattttaagtcaattagattcaattaatttgaaaaaatataatgaattaattttacctgaaattttaaaacaaattattaattgtaatgattcaattgcacaaaattatttattggatgttataattcaaatattccctgataatttccaaatttcaagtttaaaaattttccttaattctttattaatggttaatatgaatgttaatattacattattaattaattcattaattgatagattgattcattataaattaagaaataatgatattttaaatgataattcatttttaaatgaatttattaaatttattaaaaaattaaatgaaatgaatgtggagtttagtattaatgattattgtttaatattaaatgaaattttaaaattatcattaattttcaataatgatgataattatgaaataattaatcttatttatcaattatcaattgaaaaatatgaattaagtaaggataagaaagattctgataaatttaaaattatacttaaatcaattaaaaattttaaaaatttccaagattttttgaaaattaatgatgaaaattattttaaattgtttaatttacaatcaatgaaagttaagaatgaaattagtaatataattattaataaaattattgaaaataatatcattattgaaaatgaggatgaattggatagagttttcaagtattttaataaatctatattatttaaggatggtatcttatcaaatgaacatattagtgatactaaattagatttatttggagaaattaataataaaactacgaaattaagtcttgatgataatgataagagtcaaaaggatatgaaatttaagaataatttgaaaattagtaaatttattaattttgtttataataaagatatcaatattcaaaggaaattattagaaaaaattgaaaattatttaagtaatggtaatgaagaatgtcaaattgatattatacctacattaatatataaatatatgaaattattaactgatatgaaatccattagtaatgaagaagaaaagatagatgttaaagagatgaataaaatatttaataagattagtaaattaattgaaattattaaagaaactgaaccaattgaagcaattagacttaatttagataatgctattttatcaaattcaattaatttaaataatataacatatgaatattttattgaaacatttattatttatgaagaattaataattgagaataaaattcaatatgagagtttaattataattattaatacattaatgtcaatggataatatgattattaatgatattgaagaatttgataaattaatattaaaggctacattatatggtagtagattaatgaagaagagtgatcaatgtagagcaatttataaatcatcacatttatggtggattaataaagatagtgaggaaggagatggggatgatgatgaaggagaggaagatactacaccaataactcttaaaagagatgataagagagtacttgaatgtttacaaaaatcattaagaattgcagattctattagtgatagaaatattgcaattgaattatttattgaaatattaaatgaaagtgtttattattttattcatggaattgaaagtgttagtattagatatttgaatggacttattgaattaattagtaatagtttcaaggagaatggtagaagtgaaatacaatacggttattatgaacgtacacttaaatatatcaaggcacagagaccaatagacagcagattctttgatattgttactgtataatccattaaataaattgtataaaaaccctgaaatgaaaggaccctctaaataaaaattttccaactgcgcttattataaaaggaagagcttttccactttttattataatgtagctcttactactttcttcccttggtaccagcagtttgctgtttgaatgatgaatataagctacttctttccagttcttattcgactatgatgtcatggtatatttgtcctgatgttagatatggtttctgttgcaggttatcatttttctatcatcctagtctctaatatatcaccagatatattcttgaaggactttacttgccagtaattatgcatctctgataccaaactattaatattctgctggtttacttttaaagttttaaaagttttttattctcctcctctcttctgtttttgcaaaaagttttacatatgatgaatagctaccattacattcgcagtttccacggtagcagtatcgtataagatttgcacgaacccaatctgcaaatcttgatactccggtgaccgcccaatgaccttccatggatgtctgatgtttaactttgcaaagattattattattattattattatataatttacttacttacttacttactgttgtacacaaccttcaagttcatttggaatatcttgttcattccatttaaaattttctaatcctaatccacttagattatcctctattacaccctccggtggtggtaataacttattgaaattctccatttcaatatcaataaattctcttatacttgaatcattctcattataatcttccttatcaaaagtttctttaacattctttaaatgttttaattgagatttaaatctattcatatcatcaccctttacttctttattatcctttttaaaatattcctcatagttattaactgcattacttatagtttcatacatcatctctttacttgttaatttattcaacatattcattaaaacattactcatttcatcaatattattctcatcatttataccatttgtaccatttgtaccattcaacaatccctttaattcatccataccttccattgatccaatatctcctccaatatctaaactatttaataatgtagttaataattcttcatctttagtaaatttctcacttgattcatcctctacctgttttgatgaacttttcagtctattaatagtttcattaatagtatcttgaaatcccatattcccattcataccctctttactgtttaaaacatcatttaattcattaccatctccatttggatctaattgtttaataaattcactaatttcattacttaaattctcattcataccaattgattgtgtaattttactaatatcatcaatttcattaatggtttcaggtataattgtagcaccaggttcctgtgataatatctcctcttcaaaatcatcaaggtaatcatctaaatcatcaaattcatctactcctgacattgtatattgtttaaagagaaaacagtataataatacagtatttattgactacatgaaaattacaaattttttttcaacatataaatttcatatagtatttctacaacaacttcttctttgaacaactacaatgtcaagagatctgcgaacagagagaattcaacaagaacgtaaacaatggcgtaaagatcatccatttggattttatgcaaaaccaacaaagaaatctgatggttcactcgatttacataattggaccgctggtatacctggtaaacaaggtacaatttgggaaaatgcaacttatccattaacaatttcatttcctgaagattatcctgctaaacctccaaaaattaaattcccacctgcattttatcatccaaatgtttatccaagtggtacaatttgtcttagtatattaaatgaagaacaagattggagacctgcaattaatattaaatcattattattaggtattcaagaattattagatactccaaatcctaattcaccagctcaagaacctgcttggaaagcttttagtaaaagtccagaggaatatcagaaaaaagttaaattacaagctcaacaatataaagataaagtatagtatagtattatataaagttatataagttattcagtttttttgtaatcaataaatctttgtagattatttaatgtttcttcagtttgtctctttaattttaaattaacattcttatcaatattcttatatattttcttataatcttgcataatattaattaataaatcattcattttaccatcatgataaataattctattatatgaataatcatcatcaaacatttcaaaaattgaattaattgcaatattaattgattcttcaactaaatattgatattttttatgatatttagaaatatttaatttatcatttgttaatttattattataaaaattaattggttcaattaaattatatttaataataaattcaacaatatttttagttatttctaaattattaatatttttagcaataattgataaatacattaataatgatgtaataaattgaatttgaatttcaatatctgtaaattcatcaattttattttttatggaaatttcaattaatttattaatttgtgtaattatttcttcattttgaataaatttcataggttcaatttcaattaaatttaattcaaaatttaaataatcaattatagtttcaatatcaattttaccaaatgattcattaattaatttattaaattcatttaaaatcttattattatttaacatttctaaatcttcaattaatttatcattgattaatttagtagaatttaaataaataattcaaattatttaaacaaattaactttcttattatttgtgtaattaatttcaaataatttacccaaaaatggtaatatttgttcaatacatttttcattaaatactgaatctttctttgtctcatcttgtaaataaattgaacccttgatttcaattattgttgttaataaatctaatgaaatatcaataacttggaaaattttctccttccattgcagtttcattattattaattaaattagtaatattgaaaatttcatcaataattaaatttaaattatcatttaaattatccttaatttcaaatatttgtaaattaataccaattaaataaattttacaaagtgaattttcatttaatttatcagtatttgataataaattattgaaaattttggtaaaactgacattattattatcatttaataaaatattttgtaaaaattcaatactaatacttgataaatcataaattaattgtaaaatatttgttataattgataaattaaatttattaatattttcaattttcaaaatttcaaataaattattcattataatatcatcttcatttaattttggtattattgatgatttaattgtttcactatttaattccattactaaattatctaaaatttcaattaaattattaatataattaagtaataaatctttactcattatatcaacatttgaatcatttaaatgttgtaatgatttaaatgccttaggtaaattctcctttaaaatttcccaaataccatttctccaaagatatattgataaatcataactttcttcaataattaaatgtttaagtaaatctaatgaactaactaaaatttcatcatatttattattttcaataagtaaatcatttaatattatcttaactaaatcattctttaagaaagctttacgcatattttcatcattattacattgaactaatatattattaattgtaattaatttatcattaattgaactatttgaatttttctttaatttatctaataatgtaattgctttatttgattgatttatatctttattgacagattttttaccattttctttctcatttggattgactattgcattaccacgatgtctctgttgagagaagtttacttctcttctttaatttagccattcttgtagaaagaaagtactaaaagctacaataaatcgaaaaaaaatttcaaattttttcagttgaaaaatatttttttaccaaattttcatgtaacaagtcattaaattaaggcagtttaccacctgtacgtatagatagtatatacacagctacacagagtatatataagacaaaagaaactacttcttctcctcaagtctttcacgtaacttttcaaactgtaaactcttatcaactccatcaattattttatcaccatttttatcaaattctggtatataaatatcatttcttaaattaccatctttccttaattgttcaacaattaatggttcaaagaatttaacacctgaataaactccctaatccactgaaaacaagtatactcaagatcttatgtccttgtaatgccattgtaatttatatactacactttacctaaaagaaatgaacatacagttaatattgaaaaattatacatacactctctatacagatctctatataacttattttgactttgatttattggcaaatgattcgtaatattcaatcatctcttgatcaatattacgtactaattcatccaatgccttatcgaaatcatccctagtaacactctccttacctttactaacagctgataatccagcttcttgacaaagtaaaacacattcactaccactacaaccatcagtatttgcaacaagataatcaataatttcacttaattcaatatctgaaataccaaatttaattgtattcttaatgaatatttcctttctagctaattcatcaggtggtccaacataaacatgtctatctaatctaccaggtcttaataatgcaggatctattgataatggtctattagttgcaccaattaatataacaccatttaattcttcaacaccatctaattcatttaacattgtatttaatacttgtttactaacatttgttgattctccaccttctctatcaactgcaattgcatcaatttcatcaataaatataattgatggtgatgaaattctggccttttggaaaatatcacgtattttacgttcactttcaccaacatatttatcaaatatttcaggacctttaatggcaaagaaatttaatccactctctgttgctaatgcttttgctgtcattgtcttggaacatccaggtggtccatataataataaaccttttggtgctttaataccaaattttttaaatctatcaatttcctttaatggtaattcaaccatttcatgtaatttaacctttaattcttcttgacctccaatatctgaccatttaacatcaggcatttcaagcataatttccttcattgcacttggacgaatttctttcattgcaatttcaaaatcttccttcttcaatcccatcttggattcaccttgtgtaatatatctatcaattgaattcattatactttctctaactaatgataataaatcagatccaacataaccatgagttttagttgaaatttcataaatttcatcattactaacaattaattgatctttatctattttatttatttgcttttgtaaaatatcaaatctaccttcaatatcaggtattttaatttcaatttcgatatcaaatctaccaggtcttcttaaacttatatcaatattattaatttgattagttgcaccaattataacaattttaccattaccatgtaattcatcaatcattgaattaaaagtatttataattctattatctatatcacttatatcatcccttttcaatctatttggtaaaattgaatcaatttcatcaattaatataattgatggttgatatttaattgcttccttaaacgatttcctaattttttcttcactatcacctaaatatttacttataattgatgatccatcaattttaattatatgacatttacgaaattcacttgaaatacttttcattatcattgttttaccaacacctgaattaccatataataaaatacctcttggtggttcaataccaaatgatttaaataatttacccttctctaatggaattaaaattgttttcttaatttgtttaattagtttgagaatgacctccaatatcattaaatgaatattttttaaaaatttcaggtaatgattcaactttatctagtttgataacagtattcttaggatgaattaaatatccaattcaagtgccttctcttcttcatcctcttccttttcttcgatacttaattctttcatcttttcattaatttcattaataccattaatataaaatttttcacaatttaatccattataaacaattccaatatcaacaatatcattttccgttatatcaccaatataatcaacattaatactatctgcatattctaatttaccattaaatttatttataattgcacgttcacctaatgaaattccataaaggtctaaataatattgattaactaaaacaatatcatcatcaatattatcattatcatcaccattatcatctattatatcaatcaaaaatactaattcctttaatccaattgataatttaacaaatgaaccttttgttaattctaaaatttcacaaggttgattgagttattcagaatatttggataatttctaaaatttttcaaatattcattatttaatggtctaataattaattctttgacaattggttgtttaacctttgtactcggtttccttactattagtactggatttcttagtagttgtctttggtgccattattaagaaaaaagttacaaaaaggtatgtatagtttgatcaacatgaaaaataatttttttgttgaaattttcatgtcatcgttaagttaagtacttcctttttgaacaatgaaaccaagtaatttaaaactatggaaatatatgaacccaagaatagttcatttaaatccaatcaatacaccattaccaacattatatcgatatgaaagagtgaataagtttcgacataaagcatcttcacgtattaacattttaaagaatattatacccaaagaatttgaaatctctgatgatttattatttatttgttcatatttcaaagatgatattaatctaatacgtaaagatgttgaattagttaaagttgaacaaggtagaatattagaattaggtgaaaatttacttaatttaagactatacaatgtattattattcaatgatagtaataataataatgatgatgataataatgtaatgaacaaacttgattcaattgatccaagaaaatataatacatggcaaataaggtataaatttattaatcaatttaatgaaattttagatagtaaagatttattaagtaaaatatcatttaataattatcaattaacaattaaacttgaacaatcatcaagagataaaattttatttatgataattggtataatttattgtcaatttggtaatttgaaaagtaataaatttattgataattggataattagaggtagatggagtaatgaaatttataaacataaaggattaatggaaatttatacagatttaaaattaaagaaattattttaatttaataaggtattggacaaccaaatggtattggtctccaatctttatcatctactgcttttgtgaaaaggaatggtttgacttggttaggttttttcagagattcttccactagattatcctctattttatgctttttatcattgatggtttcttcaaatacccaaaatttatccatcattaattgaatatttgataatttcttatctaattgtgttgatagtagagtagaatatttttctttaataattggtaaacatttaacactaatttgacttttaatcaataataaatcaattatttgattaatattcgaatgatttataaatgaaatattggttaatatccaaataatccattcatttaattgtaataattgtgaggaatcaggtttcaattgttgataatttaaataatttaatccataatttttcaatgaatgataatggtaatttttcaagtaaattactccaaatcattctaataccatttatttgtttgatattagattataacttttttcaccatttaatattagataattgttagatattaagatgtttattattgaatcatgatgattttttatttataattgatttaagagtgtttatttgattggataattgagaagtattgttatttgtaaccatttatttgtaatttcctatattttttaatatttttcagtgtttcatgtaattgtttaatatcatcatctgataagagatgtggattgtttgataggtacaatttttgttgtttttgttgataataattatttgatttttcaattgcattaatccaatcattagtatttatattaagtaaatttaatgatttatattcatttaatgcaatttcccaataattcattttaagccaattaattgctttatcaattataattctaagcatttctaatgaaggtaatttttcatgagtacttatatgacgagattcaacaaaataatcaggtaaatttaattcatttgctaatttatgtaaacttatattaaacatactttgttgataaggatctaataacccattaacaaatttaattatacacattgaatattggagtcttgtagagagatcagaagatgatgaattattatcatttaattttgattcaataagtaatgcagatatttctaaactatgaggtaatgaagattttgttaaataatatcgtattttattaattgctaaacgttttaaagaaatgtcatttgataagaaaagccatttatatagggattcaagttctgaagggaatttatatggtgttaattgatagttttgtatgttcattggtaaaagaagattagttacatgaaaaagattgaaaatttaaattttttttttaaatttccttttacgggtagtgcaggtttcttatcagttgaagtaagttatatagggcaaacaaagatgacatcaatatttgcgattggagcaacaggattagttggatcacatttagttagtaaggctattgaatgtagtgaagttaaggaattagttacacttacaagaagggattatgaatagggaagataagaaattaaataagattattattaataatgataataatcaatggtatgatataattaaaaatagtagggaaattccaattggaagtacatttttttcatcatttggtacaacacgtaaattagcaggatcagctgaaaattttgttaagattgatcatgatattaatttaagtagtttccaatcagctaaggagaatggtaaatttacaactgcgataattgtttcatcaatgggatcaaataaggatagtaatttcctttatatgaaaactaagggacaattagaggaagatataattaatttaaaatttaagagaacaattattttaagacctggtattttattaggtgaaagaagtgttagtaaatggaattaataatacaattgcagaaaaaattggtagctttttcaggggtacatttttgaatagtacaattggatatccagtttatggagaggaagttgccaaatgtgccataaaattaagtttaagaccaattaatgaagatattgataatgaaattatttatgttaatagtgatgaaattattaaaattgcaaataattagttttatacaattagtatataatataatataatatagtaatatagtaattaaattagtaacaacatacttatcttaatttagtgaaaccaatatcctttgccttttctctgaaacattgtctacacatgttaataccatattttctaactaaaccagagtgggaggaacaaattctacattgtcttgaacctttaccaaaatttcttggatgggaataccaaacgttttcgtgtgccatgattgtatatttaatttatatgggttgtcgaacactgaaaggaaagtaagtaaagtaaattgaatctaagattaaagatatattcagattctacaatagtatgtagtatgaattgaaattgaaatttttcaccataatagaaattactgtgagtatagtatttttttcaattgttgtattacgtaagtgagaaatttaggagatattctcgatattttactatagaggaagagattttagtattttttttaattttatgtgcgtctctgtttcctatttgggacagtcgcgtctttttgttttctttgtgaccgtgttttggtttgtgctgtggtgtcgggagtggttcagggcttggtgcacgtgacctggccctggagtttcgtcacgtggttaattttataaaaataattttttatacctatcatgattattaggtagttgaaaaatttatttcaaaatttatttcaaaaaatttatttttcattaaagattagatctattggaatcagctttaatacccatcttatcatacaatggcaggtcatagatcaactttaaagaaacagaataaatcttttaaaagtggacattcatcaaaacgttcaattaaagctcaaaataagggtaaaattgaaaaaaatttaccaactggtaataaatctttaaaaattgagaaaaggaatgatcgtaaaaataaattaaatcaattaaaattaaataaaattaataaaaatttaattgataattcaatttttaattcaaataaaattgaaagaattataacaattttaccattaacaaataatttatcaattttaaatataattaatcaaattctatcatcaattgattatcaaattaatgaagaaatttcaaataatcaaaaaattattacaatttcaattgatagatttaaatcaacaattaaatttataataccaaatatgaataatttaattgatattttagattcttgtaaaatttcagattttgtcctattcgcattatcctcaattgaagaagttgatccaatttatggtgaacaaattatacgttcagttgaagctcaaggtatttctacaacttttgcaattttacctgatattgtagaaaatttccctaaaaaaaatttacaattagatatttataaatctttattaagttattataaacattttttcccaaatgttgaaaaattatttcctaattgaaaataaaaatgattcacttaatttattaagaaatttatgtcaaaaaattccaaaaggtattaattggagagattcaagaggttatttattagctgatgaattaaattttgatgataattccaagtactttattaattgatggtatagttagaggtaaaggttttaatataaatggattaattcatttaccaggttttggtgattatcaaattgaaaaaattgaaaaaattaattcaaaaaataataatattgatattataatacctgataatagagaatcattaaatccattaaatgatgataatacaactaatgaaattgaaatggatgatgatgatgatgatgagaggagggagaggaagattactattctgatgatgatgattggaatttagttaataaagaagctgtacaaaagagaactagattacctaaaggtatgtcagaatatccaagcaagatggttaaaggatgaagaaattgaaaaattaattgaagaaaatggtttagaaggtgatgatgaggaggatgatgatgatgaaatggaagaagatattgaacaagatgatatggaagaagatatagaagaagcagaatttatagaagattcaccagaggaacatcaaagaaaattagaagaatatagaaagaaagaacgtgaagaaatgatattccctgatgaaattgaattacgttatgatgaaattgcaactgagagattatctaaatatagaggtgttaaatcattagcttcatgtttttgggattatgatgaaaatgatgaaagaagaccaattaattggttaaattatttaagaaataaaaattataaaattttcaaaaatcaattaatgaaaaaatataataaaattattaatgttaaggcaggtgataaaattagaatttcaataagtttccatttgaatgataaaaatagattaattaatccaaaattaaaaccatttataatttattcattattaccaaatgaaaataaattatcagtttgtaatttttcaattaaaacatgggaaagttatgatgaaccaattaaatcaaaggaatcaatgattgttcaatatggtttccgtagatataaaattaatccattaatttcacaacagagtagaaattcaaataatgtttcaaaatttcaaagatttttacataaaggtcaaattgtaattgcaactgcaattttaccaattaattatactaattcacctgctttattctttaaatgtgataataatggtaataatatgcaaattttatgtcaaggtacatttgaaaatagtgattttacaagaattttagctaaaagagttgtcattactggtgaagttttcaaaattcataaaaatgttgttacaattagatttatgtttcataattcaaatgatgttaatgcttataaaaatataccattattctctaaaatgggtagatctgggtttattaaagaagccttaggtactcatggtttatttaaagcatcatttgatagcaaattaaatcaacaagatataattggtatggaattattcaaaagagtttggccaattgaaggttcaccagttaatttttgattatattatgtaataatattttgtatatctttctttatatcttcttttcttcattatagaccaatgtttttaccacattctacaagtaataatacatcatatacatgtatatcatgtcaaattcaatttccaagtgttgaaagtcaaagatttcatatgaaatctgaatggcatagatataatttaaagagaagaattgttaatttaaatccaatttcaaataatgaatttttacataaagttgcaaataataaagaagttgaacaatatgatgaatttggatttcttattgaaactaagaaattaaagaaaagtaagaatgttaaaaattcacttcgttatgatttattaaatagaggtagaaatattaataatattaatactaatattacaagagattcaagtccaacaaattccataaattctaatatttcaaattattcattagcaacttttaaaacagatactgattttgatggtaatttaacagatacaacaagagaggtacttactgattataatacagaggaagaaacagaaactgatattgataccagtagtataattgaaataaatgaaccattattaataactcaatgtatttattgttcattcaattctcccacaattgatgataaatttattccatatgcttgaataatcatggtttatatatacctgaaagagaatttttaacaaatgttgaaggtttaataaggtatttatcagatttagttgttattgataaagaatgtattaaatgtggatttattagtaataaattaattggtattagacaacatattaaatcaaagggtcatgcatgtataccatatgaagattcttataatagagaattttttttcacaattttatacatttaatgaagaagaagaagttgaagatgatgacattactgcaataattgataaaactggtgttgaattggcattatcaaatggtaataaattaggtcatcgtagtatgattaaatattataagcaaaaagtaccaaatgaaaggaaattaagtgatggtgaaatgacaatttcaataattaataaagaaaatgaaaaattgaaacattattcaaatgttttaaaacataataaagaaattaaagaagttggtattattaataaaaaattacaaaatagagaattttcaacaaatagtttacaatataagaataatttaaaatattatcaaaatcaaaaattcggttaatgattatataattgaactagtatcaagtggttgaaattcattaataatttcctctttattaatttcatctttattaattaattcaagtgaagtttgacaattattgaaaaaatttaatacttcattatcaaaatcttgattaatttcttcattaattgaattattattttcaatatttggtaaattaattattgaagaaattgattgtaatctattttgtaaaattttaaatgaattactttgaggtaataacattaataaaccataaagacatttaaataaattaatatttttaacgggtttaagtaaatcctaatcttaattttgcgaaaattggtgattctaataattgaattaataaatctaattgaattaatgtatttatattaatttcataattaaccatttgatttataattttataacttaaactataattagaatgttaataatgaaatacaaattaatgaaggtggattaattgaccaacatttaaataaatttgttaataaaattgagtctgtcattggtgttgtcatttttagtaagttttaaacgtaaatcatttaattcaggtgcaattattaaattattatttaaaatttgaacaattattttaataaaatcaatatttgaaatatcatcattaaacatttttcaataaaacatgacttaaatgaaatataaactttctctgaatttaatgatttacaaatttttttgatgataaaatttgattttgtatttaataaatttgaatcttttttaaataatgttaataaatcaatcataaaattattaaaataattatcatttgaattgtttagaattttagataataatattaaaattttattaattatcttgttatttgaacaattgagatttttaagaagtataataaatattttatcatttaattccataaatttgattgaatctttttcttgtaacattataagccaatctaatgaataaagttttattaaattatgtgaattatctatattgctatgattacgatgataattattatcattatcattatccatcattatcatcatcatcatttattgtgaaatcatttttattatttgaattatttttgttatctagattttttaaattatttttaagattatttgaaaggttatttaagcatatgattgttattattgctattgttattattattattataagataattcaagtaataaattatttataagtaagttaaaatttgaatcataattatttgaagagattaaattcattaattttgtatttaaattttgagctaaatttgataaatttgaattattatttgaaattatctttaataaaatgattaataattttggaatcaataaattaaaagattttggagaaattgacaagtaaagttgttaaccaatttaaagaaattgatttaattaaattatcatttgattctaaattattaattaaaatatcaataattttaggataatcaattaaagtatcttcaccaggtatataaatatcattttcaatattttcattattaattggtaataatttaatttcattaattttaattatttcttgtaataataattttaagaaattttcagttaaaattttaacatctttcaatggagattttaaataagataataaaggatctaagaatgatggtaaaaatgaaattaattgtaaatcaggtattgaatttaataaaattaaccaactaacaataaataatcttgtataagtatttgttgcataaattctttcctttaataaaggtatgaatttttccaatgaaaaagcctttgttgattgttgttcatatgattggacgtttgaattattatcaattatatcaatattgttattaattattgaaatataattagttgctttatcacatacaatatctttaattaaagtatccaatatatcagcagcatttttaacactattttctacatcagcaactaatttggacaatatatcgaaaatttcattaaaatataataatatttcacctttagcaattttagcaatattatataaagcttcacatgcataatatctaacatttgaatcattatcaccaaagcaagcaataacgggattaattattaaattaagatattttggtaattcatttgaacctaaagcaattgaaattgcagctaaacctattaaaccaccatatcttgcatatggatcatgaatattataagcaaaatcattccttaattgagttattatattgtttatcttgtcaaaatcatttgaagcaatacaatcagagattatatgttctaattccaatgcagctaatttcctcttttcatatatacgatcagttagacttctctttaatgatttatccattataaacaggtctatacactatatacatacactatatacactacttctgcatagattgcaagatatgaacaaccttgatgttggtatctaagaatgcattaagacaaccgcgcagacactgctcttcaactgcgttaactgtactaccactaccttcactgcaacacttggtgaaacatctgtctgtgaagcctgtaacactggactggatcttggcctgtgctgattccttctggatgaaggctaatacctccttctgtgcctctgcacttagttgacttacctgttgttgcactgattccatcttgtcttaaaggaagaagtgaagtatagagagtgaaaaattatttactacatacaagacattacatctttctttggataatgagtagattggaaatactggcactgttggagagattggagtaccctccatccactgtacaacccactacacactctaatacaccactttcaattgcaaatactcaatatcctccctttttataccaaatccccacatctcaaccttatataagtacagataataataataataataataataataataataacgatcaagaacatttattacaacgtatacaatcaattaaagactccaatcatagacttacatcctacatccgtcaaataataattgactacatattcgaattagaacttaaacctatactaccaaaatctaatttatctgataaacgtaatagtttccttaaattaattcaattattattaaataacaacttattaaatccaaattcaattgatccaacttacatcaaagtatctacattggatgatccactcatacgattcctacttaccaataaactaatacaggttcatccaaatgatcaaaataagatcaaattatacgatctaagtattaatctataaaatttgtgtatatctatctatctatgtatattatgtactatataaccctactcttgaatgtatatcttacgaagaataccaacacatccatatacatatccaatctcctcttctgttatatctcttctattctcatttaaacatgtaattaaatatccattatctttaataaaatattcaatcttatcattagaaatcttcttcattctttgctttctaactaatctagtatcatatttgaaaaatggtaaactaataccactcttatacttaatcatggtttcattattatcttcagtaactttataataaacaataccattattactcttaatagatctattatggaattctctttgactattgaaattatagctttcatcattattattatcatcaccattttcattataaatactaataactttactcttgctatcaattaaatcttcctcatattcatcatttctttcaattgatttgaatatcttggtaatcttttaatttaatctctctctctttaaaattaattgaatgatgttttaattaaaaccatttcattattcttaatattaagtatataaacacaattcaaaatttaatttcttaacaatactttcacaaactaatttacatgccttagtgaaattaccattaccaagtttacttatcttattccaaatatttaaatcaattgaatcttcataaattgaacaatctttagtaaatttaatcttgctattatatttatatgaattaccactaccatcattttcaaatataatttcattaaaattattcttattattacttgtagctctaccataaatttcaaatatcttcttaatattgttattagcaggagtactgtctttaccatccttacatgttgctaaacatgtacttaataacattttatttgatatatcatttttgctattattattattataagaattacttaacattattcttaattttaacattactatctaaatattccataatctctttactcattttaatcattatatcaataatactttcatcaatttcatttttactaaaagaatcaaaaattgataaaactccaatattataaccttccttagttattaatggaactccaagataaaactttatgaaaggaaaatctttaacaattggattatccttaaatctccaatctttacattgtatcaagtataagtaaaaaatcttttgaaagtatacaatgactatcaatacttatttgtcttgaacaagtatcaaatccataacctttctcaaatttaattatttgatgcctactatcaattaaactaattgaactaccattacaatgaaataattctttcattttatttaataacatattaaatctattattcttttgccaatgtggtaaattcatatatttttcaacataatttaatctatttatttcattataactttcaggtgccttgaagaatacaactttatttaaattatttggacattcaacaattgaaatattttcatttcccttagaatatgcttcataaaacatctctttagtaaatggtgcatcaacaatattacattcattgtattcaattaatgggatgtctacaatattattgttattattattattactattactattcttaacctttttattgctattacgatgatatttacgcgtagcagaattgatgttattgttacttgatgcaactttacggtattcctctgatctactaacactaacagacatccttgtaatagcaatgtcttagtgaagtaaaagagaagagaagaaatgatataaagaaaagaaaaggataagataataatataatataaaatacttcttttttcaaatagggatactctttatataactaattaattacttactttcatccatagtttcactcttctctctctcctttctactgttctcctcctctaatgataatctaatagctaatgctaattctggatccatatttggatcatccattccaaaatctccaaattctcccataccttagaatctccaaaattaccatttccatcaccatcattatcaatatttcttaaaattgcacttttatcaacttgttcatataaaaggtatggaccctgtggtatagttaataaatgtgaagatttttcttcattattaacaatttcaataaatttatctaatttacttaaattattttcatgttcaccaaaatttataatatcaattgaaatattattcttctttaattttctacctaataataaaatttcatcttcattattactaattggtgatccaataaatataataattctttgtctttgatttttatttaatctattctttaatcctaaacatgcaatttcaatacaattaataaaatcattcccattaccttcaatcttactaccatgtaatccacttaatatttgtccataatcattggttaaattacttaaaaataaacttgaactacctccattactcattaatccaacaacattctctggattttcattagttttccttctaaagataatttcaactgtatctaattgtgcttgatatcttgatggagtataatctccatttctcatatattcagagttatcaataattaccatacatgcctctaaaaccattgtcctgtgtcctgtgtctattatattctaatttgccactctatatcaacctctaataaagaagttatgtctctctataatgaattattttcattattaagtaaatgcgcgttacttaatcattaacatgttttaccactttgtttactcttctcttttggcaatggagaaatggttaaaacctctcccagtaataataccaatactaaacgtatactaactaaacaacagaaggataaaataatatctagattagagaatgaattaaaattaagagagattaagtttatgaaaactgttgattcagaaatttcattacttcatttaaaatttaataatagacttaataaaatattaagaaaattttgggatgttaaattatgtgatattttaaatattgaaagagaattaactaataatgatagacttacattagtaagtgtcattaagtctttagaaaagcaaaatcaaaagtaaatagaatgttctttttttcttatctttttatataaagtgtttatttatttataaaatattaaaaatacatagagaatataatagagaatataattatatcaattaatgttcaataacattatcccagaaatatttaccttcaatagtttcagcaattataccaactctaataacgaaatcaccaaaatgttcaccatctaatctctcatttgcccatcttgcaaacattggaattaaaattttcaaaatttcttcttcattaacattggatttataaattttattaactctattaccaatatatgaaccacctaacattaaattatagaaaccataagatttaccaactaatgcaatttctgcaacccatggtcttgcacaaccatttggacaacctgtcattctcataacaattgaatcattctttaatcctaatttctctaattcatcctctaatttattaattaaaacaggtaaatatctttcagcttctgccattgctaaaccacatgttgggaatgcaacacatgatcctgatgataatcttaatgatgaatgatctaaattatctaaattatattcatgtaacatctttttaatattatctaaatgttcatcaggtatatcacttaataaaatatgttgattacctgttaatctgaaaacacctgctttattatctttaaaataatgtgcaattttctttaatccactcttttgtggtttaccttgaacatcttcaattctaccattttcaataaaacatgtataatgatttaatccagtttcatcctttgtccatccaaaataatcaatatttgattcaatcttaaaaggttttgcttcttcaaatttatatcctaataattcttcaactttctccttataagtttcaactcccatatcatcaattgtatactttaatcttgcatgttttctattctttctatcaccattatctctttgaacaatcataattttttcacaaacttcagcaacttgatcatatttaacaaatccaaataatgaaccagttcttggatatgttttaacattattatgagttgtacccataccaccaccaactaaaacattataaccaattatattattattttcaacaattgaaattaatccaacatcatgagcccaacaatcaacatcattatatggtggcattgcaataacaactttaaattttcttggtaaataaactggactataaattggttcactatcaattaatgcatcaccaccaattttaatcttagctggtttaccttcaatacctcttgaaacttcatctaaatcagttaaccaaatttcatgatatgcagttgttgatggtaataatctagcactaattaatttacttgaatgatccatttgtgaatgtaaatgtctatttgttggtaatgctgaaatcataacatttctattaacatcaccacatgcacctaaagtatccattgcagttgtattaatatctctaattgtattctttaaatcttttttaataataccatgtaattgataagttgctcttgttgtaattttaaaatctttattaccattagtatcagctaattcatcaattttcaaccattgttcaggtgttgaaacaccacctggtaatctaactctaaccataaatgaataagcaggttctaaaccttccttctttctttcttctctaatatctctatcatcttgcatataaataccatggaatttagttaattgttgatcaactgcacaaattgcaccagttgattcatcaattaaaccttcagcaattgtacctctaaggaaattactattaattttcatatcttcattagtaattggtgcaggttcatctaaattatctgctgaaacacctaatgattcccataattttggttcccataaattatatgcagtattataaccatcatcagcttgatcatcacctaaacctaaatcatttaaaaattgtccacctaaattagtaatttttttaaataaatcacttgcaggtttattaaaataatgtgcatcctcagctcttggccaatattttgaatcacctaaaccgaaaactgaaaatttaacatttgctaaatctaatgttgaatttttcaaattttcccagaaaagtttaccaccatttgggaattcaccttgacctgaagttgaagtaattaaaacaacattcgtttctaataataaatcatccattgataaatcatccattaataaaatttttgcctttaaacctttacttaaagctcttctatttaatttatttgctaaattagttgcattaccaccatctgatgcataagcaattgtaattggtgcaccacttaatttttctaataaatctttaaaagcatttttagaagtttcattaattttatcattaattctattattaattgattttaaattataatttaattttgaatttttagaaattaataatgataatttattttctctatcaaggaaatcttttaattcttttttaataaatgatgaatctaatttaaatgaatcattatttaaaattggattaaatctatataatggccaataaccaatatcaacaactctctttgtttcctttaataattctaaataatcatttgattttggtaaataagctaaaataattgaaggaccatttgaatattcattagcttcaatgaaagaagttaaagcttgagtataagaagaataaagtgcaattgatgcaacatatgaagatttataattcattgcataaagacctaaattttttttaccttgtttaatgttaattgaagaatcactatcaataattaataattttaatcttttattatttgattttaaaacagaatggaaagttgataaacctaaatcataactccaattatcagaaccaataatccaattataagataatttaaaatattttgaaaattctaataattcaattgcaaatttagaatcatttaattttaataattcaattaatttagttgaatcatagatatcaccagtatctcttgccttaataagccaattagttaattcattatttaaatcaccgttaaattgagataaattattttcaactaatttaattaattcatttaatttattttcatgagctaaatatttacctaaggaataatctggtgatgaattaatttggaaatcatttaaaacatttaaaggattgaaagttgaatcatttgaagttactgattcttttaaaattttcaaataagcaccatcagttgatttttcgaaaacttcaattgaattagtggagttattattttcattaaaagatttaccaaggattaagtttgatgatgatgatttttcgattgaattaattgatttaacaacagaatcaatatttgaattatcaattttcaagatttggaatggaataatttcaatatttttcaatgaatcatttgataaaatttcaactaaatcgaggaataagttttgaaattgtaaattaattgaagattgttcaacaattaataatttattaaaagttaatgaagagataatttcatttaatttcaataaattgaaaggtctataaacattaattgaaatcaagatattattttcaataaattcattatttgataataattgatttggattacctaataataaaactaaatttttcttcgctgtagatgaagcagaattattattgaaaatttcaaattcattatattgaataccaacaattgtctttaaagcattaaaagcatcagttaatgaagaatctgaatcagcagaggtagttaattgagaataaactttattaatatgattagtagtataataagttatatcgaataaatcatttgattcaacataaaaatgtaaaactgatttaccagttaattttgaaataaatgaagataagattgtaaaatcaattgattgtctaatatttgaagagataaggatttggaaacctaaatctttacaacaagttataattgaataatcattatttgaaattttaatatttaaattaaaaatatttgaattttccttttcctttttcaataaaattggtaatgaatgaattaattttgatgaaggtaaattagtaacaattgcatttggttcatcaatgaaagtaagtgaatcatttgaagataatttttcacaattattgaaatttaaatcattatttgaaggatcaactaaaaataattttgaatctgagatagttgataaaatggacccaatactagccaatgctagttcttgtctctgtgccattttacgaaaagagagtagttgtctagggaagatagtaaaagagaaagaaagaaagtaaaagagagaaaacccaccaagaattaaatactttataccataaccatgaactgagccagtgaaatatcatgtaattgtaaatgatccccgtatctttattgaatcactgatattttattttacagagtccgaaattttttattagcagctttttattttatcagtgtggcgcatagtgtattctatggtatttcctaataagggaattgtctagatgtatggggcattgcacactgtcacgtgactgtttatgttgattacgtaagggttgacattaatattattttatctttatatattatctcatcttatcgatttgatgtccaaaattaattcacatgtatacagatatatgaaataatactgatgataggttatcgaaaactgacaagttgccttaatagaaattttattttttgttatacaaagaatttacaaacaaatgagttcaatgatataataacaaaacatttctttgcaaactttttccattaagaagcatcatatatttcctgttctttactttacagttatatataccttcttatacagtttctaaaaatttaatttgattacgtacttcatgacaaacttgatcattacttacaccctcagtttgaaatacactaaatttaaaatcatcttcacatagcaatttttccatatttaaccatgttcttaattcatgatcatatttaactctacgtgggaaatcttctccatacattctataccttttaccactttctttatcataagtatattcattaatatataattgccatggatttaatttaggattatttgaatgtaacataaataaatcaggtttatcttcaacttcatcattactttccttatatttttcacttatttcataatcttgtactggattaaattgtcccattgcatttgcattagatttaccttcttttattctaaatatagatactaaccttttcttaacattataatatggttcatttaatgcatgtgctgatgcaataaatgtttctttatcaccttcacctgctgctccctgtgataataatggataataataatttggtccatatgtattataatataatgttaaaatcattgatttataatgttgtcttttactaatgaaaaattgtcctgattcacttgttggatcaggtaatgtaccttcaaaatgatgaaatggtataatatccttgggacaaattggtttaaaaatattcccatattctttatatccaaaatctctacgtttattaatatcattatcatcaatttctttaccaattatatcataaaattttggattagttgtacgtttccaaaaatctggccatgtaattaatccaatttctttaaataattttgaattgaaaattatttcaggattaattaatggtgtattatctgcatcaattaacataacattttcaaaacttgaaagtgaaattgctaaacttttaaattgatatcctttaaatttataatattcattaatttccttaccaactaattttggtaaaaaaatacatcttgcattaaattttgggaatccaattgaacaaatctcatattgatattcatccattgatggtattaaaacttcaattggtaattcacatccatgttgtctaatattcataattgataacattgttaaccaagaaaatcttgcaccaccaacgaaaacaatacctgaaataccttcttgataaatattatttggatattcattagttaatgaattaatgaaaccttcatggttaaattttaaatctttaactgcttcaggtgtaactttaagatgtttgtttaattcttcccttgttaaatatggttcattatatttatttgagtctcttgcttttaatttacctgcttctaaatattcttttaatggtggtatacttggtttaaaagttaatatattttggaaaacatttctaaaatattcttttcttgcttccaataattgatcattttgactatcttcttcaataaaagcttcaatctttctaaattctttctcttcatctgataattcatcataaagcttttgagcattttcctcctctttaatcttctcttctaattcattcttttcactttcaagtttctccttctcaattttaaattcattctctaatttactaatcaattcattcagttctttcttattttcttctttctgtttattcaattcaaattgatgtctctctgctttctctatttccttagttttagccaatgttaattctctatcataactatatttataacttaaaccagttaatgttaatataaatgtaaatataattaaacaagtaaaaatagcaattttagtttgtcttttattccagaagctcattctctaatcgagtatacagctctctacggatatttcaaattaaataaagtaagcagatgatgtataatcaacaaacactaaaatgaaaagcaaaatttaaaaactgtaaaaacaagcaaaacaaaacaaaacaaaacagctatctctttacaaactacacatgctattaaccagagttcaaatttataatcttacatgtagtattcatcaacacacattataattttgttacagcaatcatattaagaaaatagacgaactcataaatatgtcggtaaaagagacatgtatattaatagcaaatcagatagtttacataaataatacgaaacaattctctacgttaaataaggttattaaaaattcccagtatatttgaacaataagaaaataaacgttatcgatataagcaattattaatttttccatttctattattttgtcagttgatgtaagtttttcttaaaatattaatactattgtttaataaaagtttaatagaggaattttttaatattgctaccgctgaaattaatcctatccaatcgattgtacattatcctacttatcctacttatcctacttattactacatatttatcacgctaaaaaactacaatcttctttcattttctgattaacatctttaaaactttccacactaataaatatagctcttatcttcttatcttgacctctacttatcatatttgtatttcgctagactttcctcattgggaacattagaaaaaatttagtccaatcaacacgtatatatcatcaagtggtccttttgaacctgtaaaacactgtttctttttccaaatatactgtataatccaatgaagggatcaattatattatcgatattaacatacattacatatgtttattcattaattgattattattcactgcataatgataaagtattacaaagttgtgcatatatttcaaatgctgaaggttttatacaatcgaaaatttaaaaactttgatccaattattaaaattcatttccctgatacaaataatggtaataatgataatataaatatctatacattaataatgggtggagaagatttaaagaaaacaacaattggtttaaatccttattataaaatttgtgatgaatttgcattaaatgaaggttattgtgaacatgaaagtgatgattcaaataaacaaaaattatcattaagtgaattaattgattcaaataattataaatatccaattgaaagttttatgttaaattctaatggtgatgatcatatttatcaattagataattcaggtgtttattgtgtattatttttaacaagtgaaattactaaagattcaaatggtaatgaaaaaaattttattgttgaagttgattggattcaagcatttggtaatttattagtaagtgattttagtagaatgttttcatcaatttattttgcaattatttattttataattgcaattattttatcattattaattcataataaattaaaatttgataataataaaacttcaattacaattgataatgttaatttaaggaaacaaaggaaatatattatacaatataaatttattttattttattggtcatattcatcattatttattacttatgctgcaaattattatacattaaataaatttggttataatacaaatagtttctttgtaccattaactaatttattatcattaacaatgtcaacattaattacaacatggatgatttataatttaattttatttagtattggtgcatggttagttaattttaaaacaactggtggtattaattctaatttaggtaagaaaatttcaattgctaaagtagttgttattacattaggtattgaaatgttattatatgatgttgaatcatcaaatatttattcacttattggacaatcaaagagagatttcctcagtaatcttatatatgcagaatacattataattatgattatttgtctcctatgttcattattaactatattgtcaattactgataagaaaatcaagaatatctacattattacaattattctattaactattttattctcaataattatatttggtgcatatattttcagttcaaccgttcaagcaagtataatggccagctctattgaactagtgttcactttgatacttaccgtcatctggtacaatgttgtctatgagaacgataccttgtcctttgtcgtataaaagtcatcctatatatagctcgtatagctcgtataaataactcgtataaataaatttgaaattttcctcactttggaaaatcatcttataattaagaaactgtactgtttactgaatgtttttataatacaaattcgtcatatcttcttttattcttttcagttatttcccttgctgttcgtttattaacaatggaggtaatggataatacaactacatcatttgttgaaagttcaaacttatctttattggataaatttcaatcattttcatggttacaaattttaagtttcatttttagtaattgcaattacttatgatcaaattaaatatcaaatttataaaggtaatattgttggtccaaaatataaaatttggccatttattggaccatttttagaaagtttagatcctaaatttgaagaatataaagataaatggtattcaggtccattatcatgtgtttcaattttccataaatttgtcgttattgcaagtgatactcaattagctagaaaaattttccaatcaccatcatttgttaaaccatgtgttgttgatgttgcagttaaaattttaagaccaactaattgggttttccttgatggtaaagctcatgttgattatagaaaaggtcttaatccattatttacaaagaaagcattagaagattatatacctgaacaagaaaaagttatggataaatatttagaaaaatttgttgaagttagtaaaggtaatccaataccatttttccctgaatttagagaatatatgtgtgcaatttcacttagaactttttgtggtgattatattactgaggaacaaattaaaatgattgcagataattattataaagttacagcagctttagaattagttaatttcccaattattataccatatactaaagacatggtatggtaaagtaattgcagataaatcaatgaaaatttttgaaaaatgtgcaacaatgtgtaaaaaagagaattttaaatggtaaaaagccaaattgtgttatggatgcatgggttttatcaatgtatcaatctaatggtgaaattaaattaaatgaaggtgaagaagaaattaaggcaaaagttagattattttcagatagggaaatttcagaagcaattttcacatttttatttgcatcacaagatgcatcatcatcattatgttgttggttatttcaattaattagtgatagacctgaaattgctcaaaaaattagagaagaacaattaagaattagaaatggtaatccaaatttaccattaacatctgaattaattgatcaaatggaatatactaatatggttgtacgtgaaacattaagatatagaccaccagttattatggttccatatgttgctaaaaaggcatatccaattacagataattatacagtaccaaaaggtgcaatgattataccatcagtttatcctgcattacatgatcctgaagtttatgaaaatcctgatgaatttttaccagagagatgggttgaaggtagttcagcatgggaagcaaagaaaaattggttagttttcggtacaggtacacatgtttgtttaggtcaaacatatgttatgatgagttttactgcattaattggtaaagcatgtatgtttacagattttaaacataaaattacaccattaagtgaagaaattaaagtttttgcaacaattttcccaaaggatgatttaattttagaattttctaaaagagatccaacaactatcgagtaggtttattattattcatttttttaatattattttatgtatttatgtttacaattattatataataatcatataagattatttatttaaaacgaaataagcgattattgcaattgcgaacagttacagcacctaataatacgatatttgaatcaccatttgaagttttatttaaagttatcaccagatttaccttttataccaccaattaaatcaccaataaataaaccattaagcatttcaactgcatcatcggaatgaccaatatcatcgaaagcatcagttgcatcatcacctgcacaatcgagtataacttcttcaccacctggatgttcatctaaataatttgtaacatcataaactttatttttataaataatccaaatatcatccctagatttatgttcttgaacttgttcaaatgtgtatgttttagcagacattgttgttgataaagagaagtagaagaaattaaaagaaaatcaaaaagaaaacatcaagataaccttatataatcaaaaatgatgaaacttccattcgttgataaatgttggaacaagttattactcttttcagttaatctaaacgaggcggcgcgtctgtaaagtctttgattatgtaatgggagataaaaaaaatttttcactgtattatagtttttagataatttttttttattttactggaattttactgaaatttttcatttctctctctgcattggacagtacaatggctcgtaatagtaatagtaaggatacctctaataaagtagttaaacctaccaaaaatattaaatctgctaaaactaaaaaattagagaaaaatgataaaattataaaaaataatgataaaaagacacaaaatttaaagaaaagaattgaaaagcaaaagaaagaagaagaagaagaagctgaaaaggaagcagctgaaaaggaagctgattttgaattaccttctgatagtgatgatggtgaagaaactgattctgaattagtgatacataatgatataatagaaaatgatgaaaaagaatcagttaataaatcatcatcatcatatcatcatcaactacacaaaatggacatacaattattaaaccaagttctaataaagaaaagaaagtttctgttgataaatcagataatcaaagaggtgttatttatgttggtagattaccaaaaggatttgaagaaaaagaattaaagaaatatttccaacaatttggtgatattacacgtttaagattatcaagaaataagaaaactggtcaaagtaaacattatggatttattgaatttaaagaatttgaagttgcaaaaattgcatatgaaacaatgaataattatttacttatgggacatttattaaaagtttcattattaacaaatgataaaattcatgaaaatttatttattggtgcaaatagtaaatttaaaattattccatttaataaaattaataagagaaaatatgaaaagggtagatcaattgatgaatggaataaattaaatgaaaatcatttaacaaatttaaaatcaaagcaagaaaaattaatttctaaaggtatagattttgatatttcaaatatttaaatgtagttctcttttatatactttctttcttttctaaatgaaatttaatcatccattatataataaattagataaatacaaatttattttatgttcatcatcaccacgtagattagaattattacaggcaaattggaattaatccaattattaaaaaatcaaatttcccagaaaatttaaataaattagaatataaaggtaatgaaattcaatatgttattgatacatcatatggtaaattagaggatgtttataatagtatagaggaaagtactaatatcatattattatcagcagatacagttattataagtaatggggaaatatttgaaaaaccaggtaattatgaaaataatgttaaaatgttgaaaaaattatgtcaattacaaaatgaaggatataaaattaaaattgttacatgttgtacattattaaagagagaggataataaagtaactacaaggaaatttcaatgtattagtgaaattgaaatgattgaaggaattagtaatgaagatattgaaaattattgtaaaagtgaagaaggatttgaagttgcaggtggatttaaaattcaaggatttggtagtattttatttaaaggtataaaaggtgattattataattgtgttggattaccaataagtatgttatttaaagaattatgtagtttcttataaataggtagttatatatatatacaagatctaagcagaaggtaatggagataatagagagactaaatttggtttattagaattagaagttgaagaccaaccaagataaataacgaaaggtaaccaaccgtaatgaacgatagtttgagcagaagagaataaattagagaatctttcctttgattcctctgataagttaagaccagccattgtgattgttaaaagaagaagtggtataatataataaaccaatcttcaacaaattcatgaaatagaaaatgaaatagaaaatagaaaatggaaaataaaagaccgacgcatcgacccgtataataataataagaataataatttctcaattcggacctcctcttcccatggggagtttattaatttatttaatactggtattttcattctaaagtttacaatttatctacaactcacttcttttagcaatgtcctcactacttattaacagatctattgcattctcaagaagtaactctagatgtttactttcatttactcatcaatcatttagaaattatgcttctaaattcccattctcatacagttattaatatgcctgctttatcaccaacaatgactgaaggtaatttaattaaatggcataaatctattggtgataaattatctcctggtgaatcaattgctgaagttgaaactgataaagcttcaatggattttgaatttcaagatgatggttatttagctaaaattttagttaatgatggtactaataatatacctgttaataaaccaattgctgtttatgttgaagatgctgatgatgttgcagcttttgattcttttaccgctgctgatgctggtgattcagttgatgctcctgctgcacctgctgctgctgaatctgcaccagctaaagctgaatctgcaccagctaaagctgattcatcttcttctgcaccggctgatcctgctccggtctcaaaatcaaccccgcaatatttaactgatagaattattgcctctccattagcaaagaaacttgcacttgaaagaggtttatcattaaaaggtgttaaaggtactggtcctcgtggtagaattactgctaaagatcttgataatattaaggaagaaccaaaaattgttaaatcaacatctgcacctgctgctgaacctaccgctgctgcaccatcaaccgattatgttgatattccattaactaatatgagaaaaactatctcaaagagattattatcatcaaaacaaacagcacctgaatatattgtctcatcaacaatttctgcatctaaattattaaaattaagaaaatctcttaatgcaacttcaaatggtaattataaattaacaattaatgatttattagttaaggcaatttctaaagcaactttaagaatacctgaaactaattcatcatatttagaaaatgaaaatgttattagacaatttaaaaatgttgatatttccattgcagtttcaactccaactggtttaattactccaattgttaaaaatgctgatactaaaggattaaaggaaatttcaaatgaagttaaagaattagcaaagaaggcaaaagataataaattacaaccagctgaatttcaaggtggtacaattacaatttctaatttaggttcaaatcatgcagtttcaatgtttacatcaattttaaatccacctcaaagtgcaattttagcaattggtacaattgagaaaagagctgtacctgataaggcaaatgaattaggttttgtctttgatgatgtaatgacaattacaggtacttttgatcatagagtaattgatggtgcaaaaggtggtgaatttatgaaagaattaaagaatattattgaaaatccattagaaatgttattataattataatattatatagtattctattttatataaaattcctgtaataaataatatacattgcgtacatacgcataataattttctatacttgatctcatctccccttcttttaaacaatgacgttaattatactgataatatcaacaacattatttgtaattatactattaagtctgattatttatacattacattattgtcttgatgaagaaatttcctactaattcaattaataatgaaaataaattaccaaataatttaaaagttaattataatgattatcgtaaaatattaatttcctttgaagattttaataaattaacacaatttgagaaacttacttatctattatcaatagcttattgtaaaataaatgatattaaacttattgagaataagataactttaattaatataacatctgaaagtttattaattagagatagaggtataaatgcattttattttcaagaatattatgatcaaataaatactatagtgtctaaattacaacaactagaagaggaagaagaagatataaatgaaactacatcattaattaaagatacattattagatgattttaataataattcaatttataaattattgaaaagatttaattattgggaaattatacctaaaataccaccatttataattgaagatcttatagaaattaattttaaatcaaaattggaagattctattcattcaacaatacttaatttaccaatacctactttcaatagaaagaataatataatttattttgaatgtaaattattagaatttaatgaattaaataatttattatcaattggattagtaagtgatattaattatccaaatttccaattacctggaattttaccatattcatttgcaattgaatcaactggtaatttacgtttaactaataaaattaagaataatttacaaaataatgaaattgaaatgattgttttaccaaaattaaatgaaggtgatattataggtttaggttatagatcaatatctggtagtattttccttacacataatggtaaattaatttatgaaattattaaaaattttaaatttaatctttatccatgtattggtattaaatcaattaatggaggtgttacaaatacaaagataaatgttaatttaggtcaattaggttttgtttatattgaaggtaatgttaaaaaattaggtttctgtgaaaataataatgatggaattattggtgctccaccaatttataataaattaattgaaaatggtaaagaaatattacttgataaaggtgatgaaataccaccaaattataattataatagggatgaatcatttttcaatataattggaacttcaagtgagaaaccagttagaaatactacacctgttagtgatccacctagttataatgaagaaaggtaatacaaagaataagaaatcaaagaagaaacataagaagaaacataagaataagaataaaaccctatttaaatgattataccctcactataaagaatttttttataaatagagaggtgtttcctctaagtatctgctttctctactagctaatctttataacaacttctttttctatttctaattaatatgatgattaatttgtttttttcaatacaatgggaatctctccgatatatactaaacatagatatataaatggcgaagaaagaaactaaaattattctgatttaattatcctttttattatcttcttctgtagtagggtttcatttttatttttttcactatatgctttccaaagtgaatcatattgtttatttaatgtatctacatcaatttttaatttctcatattccgtagttaattcattatcaacacttttttcctcctccttacttaattgtaataaaatattcttattcttaacaattgatttaatcattataattaaaaaccaaattaacatttgaattgataaaattgcacctaaaatgtacatattacgttgactataaaattttttacttctattatcccaaatatttttattaaattcaattatatcatcacttaccaccaattttaaatccattcttaattgaatcgacaaacattatagatacaagtgaatcaatgaaaattaaaataattgaaaaatttgtatttttaattgataaatcataataattaattaattttttttgaattttaggtggtaatggtaataataaaattgaaattataattgtttcaattattaataatgtaaatactaaattcatttgaattgacatgattgtggtttgcctaaaggaagagaagtaagggggagagatggggaatggttataaagtgcgagtttttattttacatatttttttcaatttcatgtttattataatatagtataaaagtatatgaataaagaaaagaaaagaagaaaataaaataaagaaaataaagaaaataaaataagttattaaaaaagaaagttgttgttgtttgttatttattaacttgttaatgaaatgtaggtaaaacattttaatattggaaaaaaagtataattaaattaaaaaaaccaataattctaacaagcagttgttttgtaattataatattgtgaattaatattatttaaattataataattattataattgtaataataaggagtattattattataattttgcatagttcatattcatgttcatattcatattcatattcatattcatattcatttgcatttgcatttgaagttgcatttgcatttgcatattcatttgtaattgtaaattataatcatttaatggtgatgacatcatgtaagtattgttgttattattattattattattattattataattatagtaattataattttgatgtaaatttgatgtatttaggttattattattattaaatgtttggaaatgattttcaaatatttgattttgaatatgattttgattttggttattattattattagtagtagtactatcattaagataatttgataaatcatttgaaagtaaatcattataataattatcatcataatagttattattattattattattataacaaattggagatgaaggaactgaagaaattggagttaaaggagtttcaattagtagtatgattaatggtactatcatttttaatccaagaattccaacaagattcaaccattgtataagaatctgttttatttaattgataattacaattaaataaccaatttttttctaaattattaatttccacaagaggtaaattagttgcatcagaccaagatttatttttaaaagttttatcatcattaaatttatttgataaaataagtgaaataattaaaattttaaaaatttcattatcaaaatcattttgaatatttataaattttaaattatttgaaatataattaattgataataaaatagttgattttggtaatctagttgcagataaaactgaattaagagaattttggaaattaattgaaggaattagatttgaatttgaatttgaatttaaatttttattagttaatagactgaatgaaatccaagataagaatttaaccattttattaatatcataatctaaaattaatgaaacaccaccatttggttgttgttgagtaataatttgattattattattaatagtattattaatattattattaataatattattattattttgataataatttggagcaaacatgataatattgtataattataatatatgaataaattaaacgactcaataagatattaattaaaaattcgaatacttaattaaaagatcgaaattttttttttgaattgtatattttataataatgagttaagtaaaataaagggataataacaccagataaaagcaataaataatataagtatattaaataaagctgggattatactgggttaagattatatgatgaacagaggccgttgttaaaggaaaggggaaagaagaagaagaagaaaagaagtgaaggaaataagattaaaaggcaaatttttcaacaacaatcagaacaggttgaataaaatgaaatgagccaggtgcgggacagtaaatttactattactattactattactaattttaattttcgtaaagtgatactccgaaaattttattgagtgaagtgaaaaatttaacggttttttgtttttttattttatttgttgttggtgtactggagaaattttattttgctcacgtgactgttgattacgtaatatatgattacataatctttattattaccgtactcacttttaattaatttaatgagtaaaaatgagtacaggtgctgtgatggcaaattttatttttcaatttttaatataaaatagtcataatatcctcaccagatcattatatcctactactccctcttttaacaacaatggctagaactaaacaaactgcaagaaaatcaactggtggtaaagctccaagaaaacaattagcttctaaagctgcaagaaaatcagctccaactgctggtggtgttaaaaaacctcacagatataagccaggtactgttgcattaagagaaattagaagattccaaaaatcaactgaattattaatcagaaaattacctttccaaagattagttagagaaattgctcaagattttaaaactgatttaagatttcaatcttctgctattggtgctttacaagaatctgttgaagcttatttagtttcatctatttcgaagatactaatttatgtgcaattcatgcaaagagagttactattcaaaagaaagatattcaattagcaagaagattaagaggtgaaagatcattaataaggtctacttctattcttattgatacccctatattatattatcctatatataattttgtattttatttagttatgttatttaaatgcttttcattttcattatagttattacgtaagacatcattctattcgcgcaatttaactattaatataccttacatgtcgatattccataatttaaagatataaacaccacttgaattcattacccaacctaaacaatgtacttaacaccagagaaagaactttatacaattattcaattattttattcaggtaattttaatgatataatttctcttaatttaattaatgaatttgatttctcaaatatcttatacgattttgaagcaaatttttataaaattcgttcatttataatattaaatcaaaataatgatgctttagaaaatttaaacattttacaaaatagaatatcaattgctaaagaaaataatcaaattgatgaattatcatttaatacccttattttagatattaaagtaattatctcatatcttaataatcaattggataatgatttattaaatttaattgataatgataaaccttcacttgccctaatttataaaaataaatatttaaaaaatattccaatttcaattaaaaatccagatttagacttagaatcttatattttattattattcacaaattatccaaataatattgatcaatatattaataaattaattgatttaaaatctcattattcagattctctaattttagaatttgcatttgcttggttaggtctattatcaaattttaatgataatataaatttaaaaaattcttattatttctttgatgaattaaattcaagttcaaatacaaattctttaaagattaaaattaatttatttgcttgtcatttaaaattaattaatatacctgaatctttagaaattttaaaatcaattgaaaatgaagaagaaaattctaatccatcatatgattattctttattaattaataaaatctcattagcttccattacttcaaattcaattgaaagatctaaattaattgatgaaattacttcaaaattcccaaattctccttatgttaatgatcttaattcaaaatctcaattatttgattcaattgttaaggaatatgcttaggtcatacgtacatcatgctatgacatctgttttgttgtgataatctctatcatcaactacattttatactttatataacacagtatatatcaattaactactttataacactaaatactctatttaatcatttaaatgtcttttatttgtgattatttatcaaaattaggaacaaaaataaagagaaatacgatccatgatgagccacctaaaattgaaaaattatccattttaacaatttttactaactcaaattacaattattaaaaaatttcatcaaataattcttcatataaataaaataactatacaacaatctaaataaatcctgtactactctccctttccaactcctcatcaggtacttcctctaatgaaattttctttggagttttcacaatcttactttcatcaattttaggtaatttaacttctaatacaccattattaaattttgcactaattttattatcttcaatacctggataattaggtaatttaataattctttggaaattaccaaatctttgttcacttaattttaaaataaatgaatttgcttcattatcatcatcacttaaatatttatttttaatttcacctttaataattaattcattatttgttggatggaaatcaatatcaacaaattctttactaactcctggtaatgaaatattaacaatatatttactcttaaattcataaatattaacagctggtgaaaatggtaaatctttttgatttaattgtggtgctgatactttaacatcatcaataataataggtgctgatgatgatgatgattcttcactaagtttccttatctcccttattttcaatagttttatgaacttttaatgatggaattggtgtatctttaatacttgcttttctaataactggtggtggaataatagtagtagcagttgtaccttcatcattctttcttttcatcttcttcctttgcttgttcttcaaattctgcattggataaatgtgataaaatttcagcaagtccttccctagttaatggtgttggaccagtttcttccggttgcttttcattctccgctggttccgattccttactttcttcaccacctaataacatcttgatgatatcatttgctgtaacttctctctttggtattgcatattgtacaggttgttgttgttgttgtacttcttcttcttcttcctcttcatattcaccttcatatggatataaattaccaaatctatcaacaacgtacatttgttgttgtggttttctaacttgtctttgacgtggttagtggtctttgataagtatttggatttacaaataatggatattcatcactagtggttgttgttgttgttgttggaatattataataaattgatggatcattgttgtacattgatgattcataaggattattaatataattaccacctcttaaaacataacgagaaggttctcttctgtattgagattgtctctctctagcagcagcttgagccctttggtattctagtaattgattgataaatgcagcagtccattgccaaaagaacagaaagaaaggaagaagaataagtcatcaaaatcatctgatgctccttttatagagctactccgagagttcccccattttattattattaatagtgcgctttattaattatttactagaaccttccatctctttcttcttgaatgtcttcttttatcactggtcccaaatgtcgaaatatgatataccttatgctatgaaacccaaggataataaggggaagagtaaaaaaggtacaaagagtaaatatgctaaatattatgatgatcaagatacatttattaatagaaatttatcacctcaaatgaagaaattattaatttatatcttatgcttttcaatatttgcagcaattttcttaactgctttaagacaatcaagggaaagtaaatttgtaagttatgaaattgatccataatttagattatcctgatagtagagagaaaaatttaatcgaatcatcaattaatagtaagaaaaatgatttaagtagcaataataataacaaacataaagatcattcaagttgatgatgaaattgatgaaattgatattctggatagtgattatggtgaaatagcattaagtaataaggaaaataacaaaagtaaaagcaaaagcaaaaacaaaaaaggaaagggaaagggaaaagcaaaagaaaaattaactaaagattcatttgatgatgaattagatgaattaattaacacaggtaatgaaaaacttaacgtaaagtctaattccaattcaaattctaaaaaggatcttgtaaaagatatggaaaaacttgaaaatgaacataaaccaaagaagaataagaatgcattcaagggtgaatactaaattattatcataaaatcatttcatttatacatgtatgtatgtttattatatttattatataacaattctttaattaatacctctttcctttgcatcaattctttcttgccaaatatttttaccagtacatgaacaaacatatttatcattctcccaagcacctgcactacgtgcaattacacctgccattgaatccatgaaaattttattttcatcaatactaacaactaatgatctaccaattaattcatccatctttaattggaattgaaataaattgttgacatttaccatttaaatcactaatcattttaggtaatttatataaataatctacctgtatttaatggtccattacttaaatctccacttttcataaaacttgcaaaatatgaaattgatggtttcataccagttaatgttaaatcaataaaactttcattttctttaattttaataattctacataatccataaacatctctaattgaattaaaatctttaattgatttattaaaatcttctaatatacaaacagctgctgaattacttgatccagttcctctaataattgcatctttaccagtttcttgaattgatttaattatctttgatggtgcagttgtacctaaaactgaaactgtttgcttctgtaaatcacatttaacttcatttataccttcatttttcttaatttcttttgtaactgattcaatacatgaatcacatgaaagtggtacattataaactgtctcaaaggcttcactaatagtcattttttgtttgtttgaataaagaattaatgtaggattactaatgctaaaaccatccagatcagatcatattgaaaattattttattatgtaatctattacatgttgataaattgctctgactgatttatatcacagacactctttcctttaaataatgtaattactttcaatcgatatacagtaaattccaacaaaggaacccaatattatcatatacaataacacgatctattaaatttatatcatggatacctgtaatttatttattttctgaacattttgcatatattggtataattgatggaatttcaatgaaaccaacatttaatccagataattcaatttcaaaggatagagtattactttggaaatttaatattagaaataatttaaaaattactgatatcgttttcattaaaagtccaattaatccaaatcaaattcatacaaagagaattaaaggtttacaattaaattcaattataccaagatatcctgaaacaagatcaaaaattttaatacctttaaatcatatttgggttgaaggtgataatattcattcaattgatagtaatacttatggtccattatcaaatggaatggttgttgctaaggcagtttggataatttggccattaaatagatttggtccaattcctgcaaatggtggtagggaatgtagagaagataaattacgatataatggaagtaataataatcaattaaataatgatgattgatctatatattcatagcatttttaaataaattaaatgcataattaattatttattttctaaattttcattaacattataataactacaatcaaataatgaattattaaatttagcttcactcttttcaggtgttgataataatggtacactcttaaatcctgaatgattagaaaatgtaaatgatgaaactgttttactccttaaatgtaaactatttcttctattaaatttaggtcttggtaatggtatcttaaaaccttcattatttattgaacttaaattaactttatcaattgtatcatcaatatcaatatcaatttcattatcattatcatcattactactaatactattattgttttgattaccctcataatcataacttttattaccattaatttcaattaaattatccagatcaatattttgattaccaaaacctccaaataatccacaatcttgtttaattaatggagtacttgaaattgatctattatcaaattcactatcataagtatttgcatcttctaataataaaaatctctttgatggtctctttttaatagtttcaatcttattacctaatgaaaaatcaagtatattagtagtattggtattattcatattattattaccagttattagtcgttgatattgattgaatacttttaattgaactatgagaatttttacgacttaaagtaattaatgatgaattccttgaattttgtctacttaaattattttcctttcttaataaatctaaatttctctctctttcatctttaaataatggatgatccatttcaatataacttaatgatttatgtaatgatttttcactttcataataatctttatatccaccttcaagtacaattatatcaggataatataaatttggataaaaatctccacataaacttctatcaaaataacgtaattgatctgccttcattggacctctatgtgaaggaaaattcacaatggaaaattaataattttttactaattctattaaattctaatggtgtctttgataaaatttcatcattgaaaaatgtattctccagttcagtaaatgatgatatatttaatgcattttcaatatgtccaccatcaaattcaaatttaaatctacaatctagaactaacagttcatcgaaaaatttgcaaaatttaccatttggtgataatttatccttattcttatattcttcaagtattaatttaaattgatcaacattaattcttggaattttaccttcatcatttgaattaatgaatttaatattagatttatttaaaactgaattaccgaaaataaattcatcatcatcactactattaactgttaatccattaatattagatgttaattgttctgtatcaattttataatttaaattcttaacactatctttagatgttgaactaaattgcattaatgattgatgacgttgtaaattaaaatgttttatcttagaatttataatatttttctttgatgatacttttttctgtaatggagatccaaaatccattatatcatcatcatcttctctattattatcatcatctccattatctgaaccaataatctcaaatgagttgtttagcactatcgtattatttatttcatcatcagataaatagaatgagttatcagtacttttttgagatggtgtgtttttaatacttatgatattatttgttggatacggtgatcctaattctttattggtattattattatgttgatgattatgattagatgaaaaattgaagatcgaatcaatacttggtttagttgatagacaattgaaaattgaatttgaagatattgaggaatttgatttagcatgtttaagagattttaaattaatacttatattatgactatgactatgaattattattaccattatgattattttgactgtgattattggtattattaagattaatttgactttgacttttacttcttgagtgattattatgagaagaaaaaattgattgatttgatttaaacatgctatttgaagatttcttccttaaatgtttcttaattgaagattttcttgaaattgttggactaccattaaatgttaatgatttatgaagtgaattatttgaaattgaatgatgaagagggatattctctttattactcccattaattgttgaaaatgataaatcatgatgattcattttataatggatgttattattattgtaattattataagatgaaatatttgaataaatactaccaactgaaccccttttctgatttataattaaaggtcttttgatattattattaaaagaatttaatgaattaatagaattaatggaattaatggaattaattgaattgactgaatttactgaatttgtagttattgaaggagagcggtagagtggggaatccaataagatgggtatattatgctcgtgtcttgatggagaggtaatattaatcataatttgaaaataaaatatgttaaaaaccaactaaaagttcttttaaaaaagccttgtcaaaaatggtgttaaaattaaaaatttggagattgattgcgtaataaaagggttatatttttattatttagtatggtaattggctattttaataatatactgtgtgagtgatttatgatatgacaagataatgtgactgatcagttattattaaatgtagtacgggatgagatgtggagggtggaaaagaaccagtgtgaaggaaatattaataatttgtcacctaataataatactgtataaatttgcgaaatgaggtaatgttagttaacactatgtcaacaggtattatttcttgttataaggaagattatttagattaatattaatattaagatacaagacagaaaagatagactacaatatgatatatcacatattaacaaaacaaaataaaagtatatagcagtatatttaaacaaattctgggatagggaatttgaaaagagtaagatatcggaataaaagaacagtaataaatttgaaacaagagtttgagaatatgaaaccaatagaaggaactaatggccctattaaagaagttaattcggtaatagtttaagactcccactattgctctcatgtaaagttacaatagaaacatgataaactttgtgagagatcatctatttctgacaatgcataagcgcgtttgttattgtttatcttttgccatataaggtaattttattgggtcttatcttttctttttctttcttttttcaaagttttgttagagttctttaatttatataagcaactatacaaatccgtaattggaaaacagtaaattccccttcttgtgtaaatcttgaactttatatcgttttgtccaagaaagtcaaaattaaaaatattatggagttgatatacgtttagaaatgaagccatattttaagtatgtatcagtctttgatactaaactttaattttgaatattagtcacttcagtaacactgaagcatctgttatatgcactaatacctgtaacaatttcaatagtttcctcatcaaggaatttatcagtaagtgagaattcttcaaatttaacatctttgcaatctatatcgtttggtaatctttgtttaacaggatgaatgtagtttaatgatccaaacacaacaagtgaagttgtaaatgataatgagaaccctaaataataaacataggtttcaccaattggaagagtacctctattaatagcatttgcaacaccagtgatgattgaatcaacccataaacctaccagatttttttctcaccaagagtaggtatattacatccttatttcagtatgcttgctcctcatgagattgataaattatttattcatttccaaatatatcagacattaaatcaatgtttatatccttaaagttttttgtctctttaccgaaagaatttgttttaaatttatcatttaacagatcttcaataacattacccttattactaacactactacattcttttagggttctatccattaatgataaaagcaatctgtcaattaagataagttaccgataaaaaattgcggggaaagaaatttattgtggcgcatatcttgattttggtgatggaaaatttgtcggaaggataattttccgtcttctgactgaaatattttatcttcttcagtccgatcacggtgattgttctataccgtagttgatatactttaaagctatatgtcaataccaatagtatagctcattatttatacttaataaattccagttgaattctcactactaaagacatgatgcaaaaatcatcaagtgaagacagcataaaagaagaaaagttcactgaagtaactaaacaagaagaacttgcacaaaaagttgcagatgctcatgataatattttgtcatcaaagcaaattataattgtctttgcagctatggcaactgctttgttcctatccttcgttgatcaaacaagtattactgtggcattaccacatattgcaaaggatttaggtgcagaaaagacaatttcatgggcaggtacatcttcaatgattagtaacaccgttttcatggttttatttggtagattcagtgatattttttcaagaaaatatacaatgattgcatgcatgattatattggcattttcagatttagcttgtggattggcacaaactccaactcaactttacgttttccgtggtttttgtggtattggtaacggtggtgtcacttcattgactatggttattgtttcagatattgtgacattggaacaaagagggaaatttcaaggtattttaggagcttgtgttggtttaggtaatgccatcgggcctttcattgcatctggtttcattcaacatcaaacatggagaaaaatgtattttacattgtttgcaattatcccacttgcaactttaattattcatttcattgttccatacactaagcctgttggtaatatgaaggaaaagatcaagaatgttgattatggtggattccttttaagttccattggtattatattcattttgattcctgtcagtggaggtggttcatcatttgaatggaacagtgcattggtcattgcaatgctaactataggttctatttccgttgtatgctttatcatctatgaaataaagtttgcaagattacctctgatcccaattaaattattctacactaacatttcattatcattgttactctcacaaaacttgttctttggtatctgttattatagtgccgtttattattacccatactattttgaagttatcagagattattcaattaccttgagttcatgttatttattagcattagttctcccacaatccactatttcaattattggcggtcaagtgatttctagatcaaaacattattggcacgttatgttgtttggatacagttcctggatagttgctatgggtcttttaaatctttggacagttgatgttagaaaaggtgttaatgttggtacactaatattaaacggtttaggtgttggatgtgttttccaaccaacactggttgcagcacaggcacattcatttaagagggatagggccactattatttccactagaaatatgttgagatcgtttggtggtgctgttggattagcaatctcatccactgttatcgccaatacatttttgaaaaatttgaaacttacaggtagtcaacatttcaataaagaacaactagattatttaaagacgcaactttattcaagagttgatttagcacaatatagtttagaacaatccgagtatctcaagtcaatctatatggattcattgaagaagatcttttatatttggatgggatgtatagccttttgttttgtaacaaaccttttcatcaaggataaaggagtgaaaccactagatggttgagctatgtataattttatagaacgaaatgaacttactgtatttattttaatttaatgtaactataaataaaggttcaagcagttcacttggaataaaaccattcaaatagtcaccaccaattatagaagttataatgtcttcgtctactgaatgaaagatgaacaagatcagcttgattattaatttgaactttttcatttgatcaaaagttttttgcagatttgacattttcttatcgcttaaatttccttttcgggtgaacttattggtatttatctatgattacgtactctttttacaagaggtagttacatgtgtaatttgctttatcagtttagaattaagcttatttatttaaatagttaaaaaaaagaatataaataaatgcataaattaacaacatcctgaatctgtagttgattcacaacatttttcacattgacaattgtcttcacatttacaattacatttacaatcgtttgattgacatttagcacatttagtagactttggagcacaacatttttcacattgacaattgtcttcacatttacaatcacatgtacaatcgtttgattgacatttagcacacttggtagactttggagcacaacatttttcacattgacagttatcttcacatttacattcgcattcacatttgtttaatgtacacttaggacattttgtggaaacagcagtattagttttagtattagtattagtatttgagcagcaagacatatttatttgattgattttgtttggtaaaagataaaagatatacactaaagacaaattaagcttaaaagaagaaaacaatgcctttatttataatcttcaaaatgagtgaacaatttgagtgaaaattgcgttgaaaaaataatttttcgtggagaacaataggaaaatggatgaccaagccgccagctgatgatatattatattgcgttctttttgccaaccttctacagatgttcttgaaggttctaataatggcttagaatgtgttaattaacttattagttgaattataaactaaaataaactaaatttatatttacactgaaattgtcaagttcaaatttacgcaatactagcctcggagattagtgcaataagaataatttcggagattgggataattgcattttcagtaggaatccttgaacggaacttctgctaactatttggtttgttgttgtacgtagaaaacgaattgtaataactccaccaagtatcaaaaccagaaacttttatcaaattcaggtagtttttttcaaataaattcttagaaacaaaactaatattgaaggaatcaattcaatattgataatatatagtatatgttaaacccttttatattttattgtaaactattttttcttaaaacttatatactttatttaattaaactgttaagaatatcttcataatgtccatgagttgcattattagctcttctcaataatttttctgcttctaaataagtattttcttgctcttcactatctaattcaagtaagttagcatatgtgattaaagcttcagctatattaacccaagtctttggttcttcttcattatgagttttacgtaaatgttttaatgcctcttcaacaagtttaatagcttctttacgtgcttcttctactgatgctttcatttcctcatcatcatcttcttcattatcatcatcttcatctctttcgtattgataactagtgaaaaatgctattggaccttcagcttccattaaataactttgacctaatttttcattaacatttctaattaatttaatatctgcatcatctcctaattaattctttatatttaatcatattatctctccagaaaaaggttataactatcatcattttgaatttcatataatggatgatcttccgaaatttcaaaatcagtagcatcaattaattctttaacaggtgccttttcattactttcatcatcatcatcatcatcatcatcatcatcatcatcatcatcactatcaacaacttcattcatttgtgtaccaaatttatcaattatatctaataaatcatcgaaaatatctaaaatttcaagtacccaatcttcctttaaaattgaataatcattatttttttcacattctttaatagctttattccaagtactggtaaattctttaaattgttttttcaaatgagggaattcatctttctttgaatcaacattcatttgaccaataaattcaactgcaattttattaattataatattacattttgcaaataataatctaatattattattaccaaatttatccataccttcatcaattctttctaatgcattagatatccaatcagatacttcattttcgggtttaaatttacttatatcacttaatgcttgaccataaatattataaaaattatcattaattgaaattttttcattaccaccattttcaatacaatttcttaagattctatcacattcattaattataccattaagtattaattcgttacttctatcactttctttccaagttttccataatccaaataattgtgataatggatcatcaggattaacttcatcagttaattcaactgttagtaattgttcatctttcccactttcattttcatttttttcaacagtttcttcaaccttttgtttcttcactttagatttacctagtcctaactttcttttactcatatttgttaaaaggaagatgatgattgtacagactgaaatttaattgtaaaaatttttaaatttttcaaaccattaaaataaaaagtgacgtgagaaaaattcttgaaatcatccaatcttcccattaaggaaatattttatttccaaatcgtaattaatataatacagtattttaatattctataaacgttaattatttaactaatgtaacaattttctctaattctacattagtattagtatcatccaattgaccagtttctattattctaaattgttcatcatcatttaatttactataaacatcacaagcccaaccagttacaattaaacctggaggtctactctcaattttattacaaacatcaactaaatcatttaatcttgttctaataactctttcatcaccacaacttgctctttctacaattgcaacaggtaattcttttggccattgtttttcatcaattaaaattggtaaaatatcaacaattctctttatactcattaaaaagatagttgttctttttggttcataaattggtaaattatcaggtattttaccctttctaccaacacctgtacaaatcataacttgatcagcaacacctctatgagttgtaggtatacctgcattagcagttgcaacaaaagcacttgataaaccacaaagaacattacatttaatattatgttctttaaagaataaatattcttcaccacctctaccgaaaatatatggatcaccttgttttaatctaacaacttttaaaccttcattaattgcatctaaaccaattttcaataattcttcttgtgcattatctgtattaccaggaaatttacgtgcaatgaaaactttaacatttttaggaattaaatcaaggatttcttgtggaacaagtttatctgcaagtataagatcagcttcatgaattgcatttaatgcacctattgttaaattagatattgaacctggacctgaaccaattaatgatatactaccacgtttgttatgatggagagaagctacatgatgatgatgatgatgatgatgcaacagtacttgcattatcatcaatatcagtataatttatttgatcatttaattgatcaattttcaattcacctaattcctttaatggataataatcaataatttgtgataaccattttaatttttcctttttatttaaattattatttaaattaatatttttccttaaattactaacattttcaattatttgattaatatttggtggaattgatttaataatttcacgttttaatcttgaagataatttacaaccttgtaaattagttgttataccaatttgtaaattatcattattataagttgataataaggtaaatgatgaatactttgatgaattaaaggtatttattggaattctatttttaatacatgtattataaatggtttcaattggtatagtagtttcattattattatttaatataaataatctatcaataatatttaaaacttcatctctacctaaattaaataaatcatttaattcaaaaggtttattaataattgataatttatctataaaagattgatcttctaatgataaagatttttcaatatcactgatattgagatttggattaattaagataactttaaaaggatttgaatttaaagttaggttaagtttattaattaaatttttagaaattgaatgatttgaagaagtttcatcaactaataagattgattcatttgaagtatttagttgtgttagtatcttcatcgttaattagcttttaaagaaagaaaaggagatataaagaagttaaagaaaataaaataaaataaaataaatatctttattaagttaaatcagtgaaaaatatgtcaaatcaaagtccatctattaccaactgataagaataattctttaggtaagcattgcgcactgtcacgtggaaatgggcaatgtcacgtgtgtgcttatgtaatataattatattgccttctttcctttaataaggggcatttcttatatgatataacacccagtagaggtatctatgtgtgttatagacatacttaccataatataccatcagtaacaccaaaacagtgaaagaaacaaacttatcatgaataacgtaatatgattggacaataaagtaagatattctcttatcgtagtgtgatatgattacttatctttaaaaactttttgacatattaatattaagttattattaattattactacgatgactttgatgatgtttattatttactacatgttgtttcttttaaacatctttaaatagatatagataataaagtatacaatggcaattaataaatgggctttaattggtattacatgtttttgtccaccacttgcagtttacctttgtgaaggagctaaaatttcagttttagttaatgtattcttttgttgttgtatttggttcccaggtgttttacatgctttacatataattggtaaaacaagatttaaggatgaatatactgatgaatcagaacttgaaaaaccataatatagggtaccttacttttataatataattacattctttttttaaacattctttataatcactacttatttaattcaatatattttaattttaatatcttataaagataataattatataattatatacagatatacttattaattaaccaagacacatacataattaatcaaattgaggaactaacatgtccataacaggagattgaagtaaaactacacctgcagcgaataaaacgacattaagaccaatcttacctaaaggtgtagagaagaatgatggttgaccttgtggtttatcttgtggcatagagagaccgttcattgtatgtctatgtgtactatgttaaatgaaagtagtaatactaactcttaatattgaaaagttgtccaaataagtcaacctaataataaatttgcaaatttcaataatccgtgcactttctcttactattattattaacactatgggaaattaaatttttcactatttgctaatattcaatgaattaatagttaatgttataggagaataacttcttttgaattgcaataactatacaatgctctctcataacagtatacgtctaggtctctctgttaggaactgtagatatttctcatctttctctcctctccttgctccaaagaataaaaaagatgttgaagcaaagaaagctttagagaaaagacaagctagaagggaagctgctaaaaaattagctgctaaaaagccagctgatacaaatccccttttcatgaatgtaagtcaagcacttagatttttaagagctgcagaagttggtagatcaaataatgaatcttcaattacaattcaaactccaattttaaaagagagaggtgttgcaactttacaaggttcagttagattaccaaaaccacttaaagaaactaaaattttatgtattacaaatgatgaattaaaaattaaacaatgtttagaaaatggtgcaagtttagcttcaaatgattcaattattgataaaattattgatggttcattaaatgtttcacaatttgataaaattttagcaactcctgatattgaacaaaatttaaggaaagttagtaaaattttaggtccaaaaggtttaatgccaagtgtgaaaagaggtacaattaatgaagatttaaataatgtaataatttcaactttaggtactcaaccttttagagagagaaataattatatttctttaactgttggtaaatgtaatttctctgatagtgaagttttaaataatattttagcaacttcaaatgcaattaaggaatcaataagtttaactaaatcaaagaaaccaattgttattggtcaaactgttttaagttcaactcatggtcctggtattgtcattaatttctaatatactatactatactatcctatactactatatactacatgtaaataataaatattataaaataaaataaaataaagtaaataaacctataccactggttaaagacattacgcggtaacatgaaattatcatgtaatcaagatccttcaatttaaatttaataaacaactgtcatttacttcttttttcaatattccactagcaatgactgtagtggataccaacataaagaaagaagaatcaactcctatcattaatgatgataaaaaattaagattttcaattataattgtattattattaacagctataataattggattcccttcatggtatttaacaacatcagttgaaagagcatcattaccaattgatgaaatgaatttattaaatgaaaaatgttcaaatggtataaattataaaatacccgttcaaatatctggttatgatatagatattaatgaattacaaattaaacttgatgaaaaattattaaattctaatgctaaaatttcaataataaatgaaaataatattaacgatacaaatacttatcaattgaaaataatacctaatggtattgaaaataaattaattgttagtccaaatagtgataaattaattgagttatatgttactaatgataataatatgattaatgatttaatttcaagggtacttattgattctatatttaatttagaattaaattatcatcaaattgataatatttcaaaacttattaaattaccatttaataaaagttataaaattagtattaatttcttacatgaaaataataaaattttcccaaataaggaaattttacaaaaatcaattaataatttccaaaattttataaattcacttaatacaattgcaaattttacaattgaatttcaagaattatggcatgaaaagagaattataactgaaaatgaatatattaatgaaaataattttactgttattaaagatataaatagatttgttgattattcaaattgggggttagatcaagattttgatattaatccaattataaatcttaacctttatttacctgatggtgaaaatttattaattgaaaattctcaaaaaaattcttttattataagtaaatggggtagtgttattatacttaatgatgatgaagttaattcaattgattacaataaaatgaatgaaattttcgatatatttgcatttcaacttttaaaattaattggtattaattcagaaactgataatttcaataatgatggaaaatcattatttttcaaaattgatgaatttattagaattcaaacaattaaaaatataaatgaaagtttaattaatttccaaaatttaaataaattaattaatcaattgaaaactataccaattccattgaaatcagttgaagaaattaatcaatcaataattgaaattgaaaatactttaaattatttaaataattctcaatggtatttagcttataaaacttcaattaatgcagttgaattatcaaataatgctttctttcataaagatatggttcaacaagcttatttccctgaagaacataaaatggcagtttattcaccccttttagggccatttgcaactataatgataatggctatcgtacgtggtataaaagaattaaaagctaaataaaataaatgtataactcattaactatacaaatccaaaatataattcatcatcaatgaatttagtatctcttgatgttttcttaataatatcatcaattctattggttcctaacaagtctaaattagggaaacagaaaagtgattctaaatcaacatctgaaccatccgttttcaatatttcattgaaaaactgtaaattttccttcttatgtaaatcttgaacatgtttctttaaattgttttgtccgaaaagatcaaaattattattaatgaaaatatcatcttcattgacagtcttattattcattttagattgttgattctcttcaaccatattaactaatttctcaaataatctagagaaaatttcacatgcaccagtcctctcagcaacactaaacaatattgaactacaacatcttaaaccttcactaatggaaaaattccatttaagtttctctgataataatccatagataagtgttgctccactaagaaaaatagtttgtaatgcaataaatgaaaaccttgattttgtgttatgatccattcttttactcaactgacaaacagtcaatgaacttttcatacattcaataaataaagggtcatcattactcagttgacttaaatatggttggatcaaatatctaatttgtttgttaaacaaatacaaatagtaatcaaaatcattacttgataacaattgtgggatagtatttgtccattctttcattttctctataaacatattaatcttctctcttggaatatgatcaataggtaaatcaactctgtatatttcattctgtatctcactttcaattcttttaaacttgaaattatgaatagcttgactacgtgatgttagcctattaataacaaatcctttcttaatattagtataatattcctctatgattgtattattatcaaatacactttcatcaatattaattggcatatctacatcaatatccctatcagaaagtgaatatggacgcccaaaactaccactaatagacctttctaatgaatatgttgaccaaaaagttaatgttctatactgatattcaaccggcttttcatgtaataattgtaaattttttctatgaaatccaaaactaacacataatcttaatgccgattcaataatatcccaaataacaggtccattgggtaatcttaattgataaataacaactaataacatacaatgaatattgtttatacttttaccttcaaatatcacagataagttaagtttcattgcagttgtgaaaaataggaaattatcgtttttcattgatggttcagatgttccatgatgatgtggttgttgtttacctgtaagcatcgaaccgatagcatagaccattaataatgtaaatgatttgattgtttctgatttggtttgttgtttgttaacattttttaaatatactaatctattctcatgtgcttcagtaatatagtccattttcaaaaatgggtacttgatatgcatcttgaacaagtaattatcgacatacaaagtcaagttttttcttatcctccaataatgtatcaaatgaaatgattactttatcattgattaacttattattttcaattgatgttgtttgcttctgttgttctcttagcgtttcactcaactcaagttttaaatgtgcttgtaataatgatgcaatatttaatcctgatgatccaacgtataatggttccatatcatcctttaacgggaacaaagcagcacatttggtcagaactgatccatcattcattgatatatgatcactaactgaacttctgtcactataactgtcaatatgtttaatagactcatcatgtctttgaatttgtgttggactctctgttttgaatattaattcgttttccttgcttgctagtatactctcaagatgatttgatcttactctctaatatcttgatataattagggtttcgtttttgactatattcacaattaacatttgctttctcacagtttttacatttcttacctgtcagtatatctcctgtacatttttgtttcctggattgacatctgatacactgcaactttgtttaagtctattcttgtacctttggataccttagctgttgagtctactagtttcattttggtctattggttatctgtactagttctactaaggtaaccaccctcaccaatatgattgatcttcagtcggttataggaaacggagcgattccgatactttttatacaactttaacaaacggtaaatttcttatcggaaattgggggtgctctctgataagagcaacggagattgtgcgaaaatttgagttattgatatggaaggtcttatcttatctaatctaatccaagaagctatagctacgggactgttccttataattatcatcttattgttgttaatttggtggcctcttgtcactttgactgaaatttttatttttgacattactcccaaaaaaatctctgtaagtgatgtcaaagcagattcctttttttacgatatcacatcagtataataaattattcgtcaccaacttgcaagttaagaactgatgttttttaacttgacaagaaatttgtaaacaaaaataaaaagtattttaccaggcttatgtttggtttcaagatattgataagtaaagattaacgaagttttaaataaaaaaaaaatgaaaattataaatataagagtgaagcaataattaaattagtattagttaccagtactaaacttttgaagagttttgaatatcaattacttcaatgacacttgaatcatctgtaatgtttttatgttcactggcacctgtaacaatttcaatagtttcttcatcaaggaaaccatcagtagctgagaattcttcaaatttaacgtcctttaatatccatactgtttggtaatctttgttcaactggatgaatgtagtttaataatccaaacacaacaaatgcaattgtaaatgataataagaaccctaaataataaacatgggtgaacaccaattggaagagtacctctattgatagcatttgcaacaccagagatggtagagccaactgcacagatccatgcaacaaaagctctataattgataccaaatttattaccataccataacattgaacttttatcattgctgtagaatgaaacaacgtggaagttaccctttctaacaaaagtagtaatcgtaaatcataacagcagcaactggacaaagcataatagaataactaccaaggaaatgctaagaacttagaaccactggaaatcatcttccatgggaaaaataatggacaaacaatccaacataataattggcctctgacaattgtcaatatatttagggaacataccagtagtatcagcaccgacaggtaaacagttagtaccaatgttaacaataactaaagctaagatcataccgaaagatgcaaatgccattgcagttctcatacctgcagtccaatgatagtctaataatgcctcataaagatcccatgggttccaaaatgtctcacctaagaataccttagcagcagaagtagtagcacaacctaagaaagtaattaaaacctttgaagataaaactgcaaatgattggaaccaagccgcatctgatgtcttcttagcgtacctgacaacatcaccggcgttaattaaaataggacataatgcacccataatggaattaataccatacatcatagcccaacctaattctgaaccatgagctctagttgctgctaagtcttctggagaacccaaaccaccagcctttctaacacagtaaccaaaaacaccaaataatgtaactgtagtggtgacagctttgacggtatataaatgtctttgaatagttggatgcataaaaatcagtggtaattggataatccagacaataaagaatgctaataattgagatgatgtagtctcagctgattctggaaatgtgtctttgatatctgaccatttgtgaccaaagattgatcttaaaaggacactcatcaatctaccagcaaagaaagtttgagttgcaaaataaattgaagcaacggagactctaatgaaaatgaagaaatatgaaccatacattccagcaggtgcacgaacaattgcagggaaacctagatggtattcagaagatgctcttgagtttaaaactaaaatgatcgataaaaagactgaaccaacaacggcacagattaaaccttgccaccaaagtaaacccatagataccaatgttgcacccaaagtatatgatgaaggagttaaggaagtggtaaaatagaagaacaagaaattgtttctagaccatgttctttcctcacgaggagttggtaataaatctttgttgtaccatgaatggcctttagcttgtgctgattctaactttaatgttttaaaagggttttccatttgaatttgtttgcttctttatttaaaataaatataaaaggataaaaaatatattttaataaatataataataacagtaattgtgtagcaccaagaagtgaaaaaggaaattgtcaaagtcttttatatgaattaaaaaaaggtgcaaatgggatgataagtaaatatggtatcagatcaaaaaaaaaaataatagattatttaaccgtttatctaacaataaattaattaactattgcaatgtagggttaatcttatcttgtagtcttatctgattatcggataatttaatcaaagtaaatacctaaatgagtaattaattagaagaatacaataataagaagacaaacaataatttttcagtcggtggagccccgattataaatactcttttctataaatattatcatgtcaagataaaaaaatcactaggcgataagaataagaaaagatttactgataacggccataccgagacttcgcttctcgcatttgaaattatcacggagactctccgatcaatttattttttatctacaactttctatcttacatccctatttcaatcctactccgaattaaatgtcggtaagagttcaataggtaatactatcaattatatgtcgtaaatatatgtgcccatattaatatatcagtttcttcctttatagttccctaaccacaatttaatttttactattcaacacgcataatggagaaatcatcaagtgaagacagcataaaagaagaaaagttcactgaagtaactaagcaagaagaacttgcacaaaaagttgcagatgctcatgataatattctgtcatcaaagcagatcatgaattgtctttgcagctatggcaactgctttgttcctatccttcgttgatcaaacaagtattactgtggcattaccacatattgcaaaggatttaggtgcagagaaagacaatttcatgggcagggtacatcttcattaattagtaacaccgttttcatggtcttatttggtagattcagtgatattttttcaagaaaatatactatgattgcatgtatgattatattggcattttcagatttagcttgtggattggcacaaactccaactcaactttacagttttccgtggtttttgtggtattggtaacggtggtatcacttcattgaactatggttattgtttcagatattgtgacgttggaacaaagaggtaaatttcaaggtattttaggagcttgtgttggtttaggtaatgcctatcggacctttcattgcatctggtttcattcaacatcaaacatggagaaagatgtatttcacattagtttgcaattatcctacctgcaactttgattattcattttatggttccatacactaagcctgtcggtaatatgatggaaaagatcaagaatgtggattactggtggattccttctaagttccattggtattcatattcattttgatccctgtcagtggaggtggttcatcatttgaatggaacagtgcattggtcattgcaatgctcactataggttctatttccgttgtatgcttcatcatctatgaaatgaagtttgcaagattacctctgatcccaatcaaactattctacactaacatatcattatcattgttactctcacaaaacttgttctttggtatctgttattatagtgccgtttattattacccatactattttgaagttatcagagattattcagttaccttgagttcatgttatttattagcattagtcttcccacaatccactatttcagttattggtggtcaaattatttctagaacaaaacattattggcatgttgtgttgtttggatatagttcctggatgattgctatgggtcttttgaatctttggacagtcgatgttagaaaaggtgtcaatgttggcacattagtattgaatggtttaggagttggatgtagttttccaaccaacatctggttgcagcacaaggcacattcattcaagagggatagggccactattatttccactagaaatatgttgagatcgtttggtggtgctgttggatttagcaatctcattcactgttattgccaatacatttttgaagaatttgaaacttacaggtagtcaatcatttcaacgaagaacaactggattatttaaagacagcaactctattcaagagttgatttatcacagtatagttttagaacaatccgagtatctcaagtcaatctatatggattcattgaagaagatcttttatatctggatgggatgtatggcatattgttttgtaacaaatcctttggatcagggataaaggatttgaaaccacttagatggatgagctgtatataattttatagaaagtaatgaacttattgtatattgaaagatctactggaagtgtttatatgaattcggttcactacgtcgatacatcgttgagccccgctgtgtagtgaaaattttcatgttaatttaagcagtttttaattggccaatcttatgcacactttttttacaaggtaattaataattcagtctatttattaattattagtataaaagttaagttacaaagattataaggaagtccaatcatacgattgttcaaatgcataggcaaatctatagatggtgttttcatcgtaccacttaccaacctaattgtaaggaaactggtaatttagttccactgcctgctaatggaaccttcttcaattggtaataaaccacatggcattgccattgccgggtgaccagtttgattgaatggctgcagtattggaacttaaaccaacttgtttatcctaacaaatctaatggacgtttaacattgtccaaatcacagtgtgatcttgcaacaaatggaacagttggcataacaacaatatcaatatttatccaatgcagtgtattatagtcatcctttaattttcttgataagttcatacatttaccatataaggtggggaatttttcagttgcatataagccgttatagtagatattctttgatgatgggtaagcttccttccaacgttcagcatcctttaatgatttaggcaaacttgctcgttaagatcattcaaactggtaccacgtctaccaataccacagcccatcttggtcaaggaaaccaccgactttggaaataccagtccaaattaatggacctttggaatgtaatgggatactgactttcttcaacagttgcacctaatgcttcgaacttcttgactgcatccatagcaacattgcttaactcttctctcaactgcagggattgctgaaaccctcaatgacaatgccaacttttaaaccagttaaatcttttggattttttaatgacattaagttatcgtagtatttaccgttttcaacattgaaacctctatcatccatattgtcagtacctgctgttgcttgaaggccctttgcattgattaaaacagattcagtcataatacctaaacaatcattagtcgcttcattagttgcacaaccagtgaatggcattaaaccaaatgttggtttcataccataaagaccggaccaagcagatggaattctgacagaaccaccttgatctgcaccaataccaatatcaataatcttcagctggatctgcaacaatacaaccagtacctgatgaggaaccaccagtggaataaccgatagcccttggattgtggacgtaaccagtacctgatgagtgggaagttgcagaatgacacaagttttcacaaacagctttaccttcaatagttgcaccgtgttcaagcattctagtaatgattgttgcatcagtagttggagtgtaatcagtgataaaattggtacctaataacattggaacacctgcaatagcaacacaatccttgacacaaactttggaaccttctaaaagtctatcactagtagaagtaggtttttcatccttgatggagaatttccaaccccaaccacctaatttgttttcttccttggttggatatctaacatcctttcttggaaatctttctaagtcaacttcttgtaaataatcatccatatccattatttcttgacatgcatcatggaaaacacctaacaaagtggtgtaatcgttgatgtcaacttcattggtttcatgaacacctagtttttcaccaagtgttttgatatcatctttggtaacagggttaccttcctttgtgtcaaatgtaaaaacagacattaattgtagtgtattttgtttttgcttaagaaaattaacttttgaaataaaaacggaaataaattttagacagatactaatagttttaagttactttaagaactaattattcggactgctgacgagctaaacataaaatcgggaaacggtaaatttccgattgtagctgggtattttgataagagacttttgattatcccaatcaattattaatcaagactatcatggttatctttatcagaccttcaactaatgtcagtgatcggagagtatccgaaaaatgaaaatataaaaccgacggagattatagcgataagaaaaatttcgggcgttgcgataagcaattatttaacggagtctttccgatctatttcagttatcagatcaggtactgaaataatggaacttatcatcaggtctgtagttataaaaggtggttaaacttccgttgatattgtggactaacttattcatatatgttttatttttatgaattaacaaaaaacagaacaaatacaatacaatacaacacaaacacaaaatggatactattaattacactcctggtccaatgccacaatacactcctggtagagatttaattggttatggtgaggaaccaatcgatgtggaatggccaaatggagcaagaattgccgtttctttcattcttaactatgaagaaggtggtgaacacaatattttaaatggtgatgatagatctgaagcttacatttgggaaaaaggtggagcaactactgaagttttaaatggtagacatttaatgagtgaatcagaatttgaatatggttcaagagctggtgcatggagattaatcagattattcaaagaatttggctggccaatgactttgtatgctgttggtactgcattccaaaagaacccagcatttgcaaaagcttgtgttagagacggtcatgaaattggtaaccatgggttaagatggttacaatgggcccatttaagcgatgaagaacaaattgaaatgattaagcaggcaattttaatgttagaagaagcttctggtgaagctccagttggtgcttatatcggtagagctaatatcagaaccccagaattggttaaaaattgcacatgaacaattaggtaaaccattactttgggaatctgatgtttataatgatgatattccattctggagagattgtgaacatgaaaaagatttaccaaataaagaaaagaaaggtttattaatgatcccatacaactatgttaactaatgattataaatttgttgcttcaaacccaggtccaggtttcccaggtgctttcgtttatgaagattacttaaagaacgaatttgatcaattatactagagaaggtggtagaatgatgaacattccacttcataccagaattattggtaagccgggtagaaccaatgcattaagaaacttcatgaagtatattagtgagaaggaaggtgtttgggtttgtaacagaagagatattgcaaatcatttccaagaaaaattcccatatattccaggtaaacttgcagttaagaaaactgattaaattgattcttattttgtaaaaaattgtatagaaagctgatttcataaactttcataaattaaattaaataagctatatacagactattgggtataaaagttaaatagttgttcctctgaaattcccattgttgatgcatataataagaaaaattcatctattctgaaaggtttgctttcactattttcgtacaatgtataatgatcccaatttttttcttcaatcatttgaagatgacgacttgtatattcttttgttaatttccattcatgtaaaacttcagtattggagcattgacccatttgtgcattcgcataaagattgccaacaggatcaacataacctggacaatcaaaagtattgatccaaagggtaaaatagtcatcaaatacatgatcaggttcagttatacgcgttaaagcttttggatataatctccaaataatttcttcatatgcatgtgggaaatgtgccctaacaccttcaaaatatgatggaatcattgtacttaattcactaattttataaacattatcatttttacaatgaattaactgtttatcatcttgtagtttccttaattcaaacattaatgtatcgtaatagacatcatcaccttctactgcaaaatactgattcatttcataatctttatcaatcaattttttaagttttttatttgtgccgatttgaatacttttaagataatcatctgtccatgctagtgctgtaatatctagataaacacctgtacttatatcaatcagtctaccatcaataacattattaccatcacctttatatctactataatatgcagggtttatatctaataaatacccagtcattgcagattgaaacccatccttttcattataatcaattattaaagtttgattgaaatttcttgctaataaattaagtgatttcatagtaacgataacatcaatatcaccatcccaaggtaatgttaaaccatttctaatccaacctaacattgaaccatatgcaatgaaagttttgatttcattctcaagacaaaatctaagccaagttcttgaaagtctatgaataattgactttctataatcatctaagataaaactacctgaaaaaaatctccaatcataatgtgaaccataagaaacggcgtacagatcagcttctgaaaaatattttggatgataatcattatctattctaaattgttctaatttacttaatctgtcattcattatggaatcataattcttagtatcaagaacgtctgctttcatatctaactcatctaaaaattcaatctcatcccacataaagtctgaaaacccccaattggatagggtcataccaggatctttatttctagaattaagtgaaagataagtttgatcacgatctatatttatattctcttctttataaattattttttcaacatcagaatatgctaaagtatttgatagtttatttcttaatgatttaatactaattccattttctaaaaagtcattttcatccctatttgagttttttatctctaaatctataaatttaccaacaacatttttatttctaaaaatttcatttctattttcattttttgaactatctacattaatcatcaaacttccctcaccattttcaccgaaaacatcaagcataaaaatacgctcaggtggtggcatactaaatttcaaatacgatccggcatatagtaatctgccgggttcttttattttggcagatgttggaccagttattttaaatttatatgggtaatttttcttttcatcttgatttaagtcaacacattttgaatggaaatttacgtttaactcgcagccataaatcaatgcaaaagttttacaatctaaatctcttaattttgaaatatcatcaataaaatcatctgaatgatgtgataaccaatccaaaagatattcatcatcataacttaattttgaatcaatatcaatccaatcatcccaactaaaaccaattgaaaatttagcctctagcttatattcattatgtattatatgattatttaaatacattaataacagtgcaggtgaaaatcttggatcaaaaatattttgtgaaatatttgtaaattgagaatgataattcggatataatttatctaaatacggtatcactattttatgcaatggggtatatctatccttttccttaattatattcaaatgagatgaattatttgatgaataaaagagtgttaaactgagtaatatcactaacaacagcccacatatattaactatataaggtaacgtaaccaaaatggaaatgcgttttcgtatacgatgatagtaataaaggagtatttccttgtaaattgaagtttcaacttcctcaaatgaattagcatcagtcttcgatgatgtaattatcatctataaaatcatcatattgggtgagtaaaaatgtgttatctgtgtttaaagttgatgatgaataattactacttttagaagaagggggtcttcttgagctgggaattgatcgatgtctttctccattagattctgatttaagttccagatccattttttcagtagagatgctgataattgtatgaataagagaaatgtatataaaaaggtaccaaaagaagtttaagaataaaaagaaattgaaaagttccagatccgaaaaaatcattttctcagggtagcatgagtgttaaaactaggagactaaatttacttatctcttatttatctttttgtttctttatcttgtactatattacactataaacacggaatatgttattaattaatctagttaaaagtttttttaaaaatgtccttcttcagctaattgataccaaactaatcagtaacttggtttcttgattcctctgaatttataatatttattcatacaagaacctatttgaaatgagaaatcttctttcggattacatgaacaacgtccctcttttcttaccttttcatctcttggacaactagtaaatggaccatgataatatccaacatcatcaaaataatgaatttgttccttatcaaggaacaaagaggcagcaattgaatgaactggtgcatctccccatctttcatagaaaaatccacctgctttatctaaatattcaaaatatgaaagataagctttacttctaaggaaatctaatttaccaatttcaaaatttgaccaaaaatgacataaattatatgaagcaccatcatcatcactaattaaaggcattgaattttcttcagctataaaatgaggatatttatccataaattcaacagttttatcccataatgttggaattgtctctctatattcttgcattgcaattgtaaaaccatattgataatcattttgtttcataaatttgaaaatatcataattaatatcacaataaaatttaacacttggttcaactctccaataatattcatattcatccattaatggatgtctaaaaaagaaacctgattcatatctacacatatgtctataagaaattgaatcaccatatataacacctttacttgtcatatcttctcttgcttctttaaatttttctgaattaatccaaagtggtactgaccattgatcataaggtataacaccatatttagttgtaccactaattgatttagttgtttcttcaataaattcatcagtgaaaggttcatcattaaggaaaacccaatcatacccaaattttgaattaaatctatcttcaatactttgaattgaagataataattcccataaatcagcatttctagcaagtgtaacaaaggttgccttaacttttttaactggatttggtaacgctcttggtgattgagattttggtggtatttctgaaaatgattttgattgttgttgctgattcatttcatcattggtaattatttcaccaggagatggccacaaaaagaaataaatgaagaagactaatagtattgataaaactgtagttctaccaatttttgatttcacacgaggagccaataatccggccattttagtgtgaattgggtgatattaatccaaatgtatattaatctgggtatataaatatagatttaaaagaagatgtgaagaaattggagagaaaatcaaaaataaattacttgattcgctttcattcttgttaaaggttatttatttatttaatcttatcaactattataaaaacagaaaggaaaagaaaaacaacttattaatgaaaataaaccaaggtattgagaatgtaaataaatattggaaatacgtacattagtatcacgattaatcaccgtatttttcccaaccttcaggttttttaagaccctttaatttgtaatatttgttattacagaaataatttttaaaggtaatatcatcatttggattacagacacaattcttttctaatctagtttgttcattaactggacaattattgaaaggaacatgataatatcctaaatcatcaaagaaatgaattttttgtttatccatgaataaaccaacagcaattgaatgaactggagcatcaccccatctttcatagaagaatccacctgctttatctaaataatcgaaataagctaaataagcatcagatctccaaaaatctaatttaccaatttcgaaatttgaccagaaatgacaaccattataagtaacaccaccatcatctgataaccaatccataaaattatttggatgtaaatattgaggatattcctttaagaaatgtttagtagtttcccataaagttggaattgttgcttgatattcaggtaatgaaattgtataagaatattcataatcattatcttgcataaatttaaaaatatcataatcgatatcacagaaaattttaacaccaggttcaactctccaataataatcaaattgttccattaatggatgtctaaagaagaaacctgattcaaatctacacatatgtctataagagattgaatcaccataaataactttttcttgtctcattctttctcttgtttcagcagctttatttgtatcaatccattcagggaatgaccattgatcatgaggaattaaaccataatgagttttacctgaaactaatcttgaagtttctctcttaaattcttcactaaattcttcatcattaaggaaaacccaatcataaccaaaatttctattaaatctatcttcaacttgtctaattgaacctaaaatttcccaaacatcagaatttctagctaatgtaacaaaagttgccttaactttatcacctgcaataatttttttatttgcattagcaattgattttgaattatcagtatttaaattagaattggaattggaattagcagctgcattactagttccatgtttttgatttaaagattctttaatatcagcaactgaatgaggagaattatttgaaactgcataagatgaagatgaaccctttgaaaggatataagcagataagataagtagaagtgcaaaaaaggcaaatcttactaatcttgcattagaacgagccatgattgcagagtctgataaaagaagttaaagatcaaaagaataaaagaataattaaattcaacaaacagcatcaaaataataaaaaatggtgacaatagtaaaaaagtcaaaaggagaaaaagtaatttatttacgtgttcattaattaaaagatctgagatggggtcgacgcatcgtcctttaatgatttgccctcttttcaattttcattttcgtgtctttttgcccttcttaggcacttactgcaggctcagctatctttattcacttttatattacacttcttcttctgtaaaggtatcaattaccagctcttatacttctctaagtacctgtaattactgctttttaaagggattgtcaacgttcaatctctctgtatatgcttttacccctatattcatctttaaaatcatttacaaatttactctcaattagatcttcaataaaagctaccaccaaatttacaaaacaatattattctttaatgacttcaaaaactgcaaaaaaattacactataatagctgataatgaatctatcaataaacctgatattgatgatagaaattatcgtataattaaattaaaaaataatttaattgctttacttataaatgatccttcaactgataaatctgctgctgctttagatgttaatgtaggttcttataatgatccaaaaaatttacctggtttagctcatttttgtgaacatttattattcttaggtactgaaaaatatccattagaaaatgattataattcttatttatcgaaaaattcaggttattcaaatgcttttacctcatctttacatacaaattattatttcgaaattaaaaatgattcactttatggtgctttggatagattctcacaatttttcattaatccactcttctctccttctggtaaagatagagaaattaatgctgttgatagtgaaaataaaaaaaatttacaatctgatacttggagattatatcaattatcaaaatctacaacttctttaaatcatcctcataatggattttcaactggtaataaagttacattaggtgatatcccaattcaaaataatttaaatgttagagatgaattattgaaatttcattcaaataattattcttcaaatattatgtgtttatcaattttatcaaatgaatccttggatactttaacaaattggactttagaattattttcagaaattaaagataaaaatttaccaaaacctttatatttaaagtcaccatttaattcaaataattatattggtaaaatttataaaatcaaaccaattagacaaatgagaaatttacaattaagcttcccattcccttcaacaagtcaattttgggaatatctacctgaaagatatttatctcatttaattggtcatgaatccaaaggttcccttctatataatttcaaaaataaaggttgggctaatggattatcagctggttcaagtcaaatatctgctggtttctctgaatttaatataagtattgaattaacaagtgatggtttaaaaaattataaattagttattgaagatgttttcaaatatcttaatatgctcaaagtagaaggtccaaaggaatggattttcgatgagttacataaagagtcttttaattctttcaaatttaaacaaaaaactgctgttgcttcaacagtttcgagaatggcaggacaattacaaagtttatcattttattcaattccaatcaaaaatccaattgatgatattatagaacataatactgttaatatatcaaatataccaccaaatgaaattttaagtttatcaatttcaagaaaatttgatccaaaattaattaactgatttattagtttatttaaatcctgaaaattttagaactttcctagtttctaacgatttatttgataatggtgaaattgataaatcactaattcaaaatgaaaaatggtataatacagaatacactgttgaaagttttgaaaatgaaattgaaaatctgaaaaatttgaaaactgatccaaatttaacattacctgaaaaaaatgattttattgcaactaattttgaattagcaaaatcaaaatcaactaaatatccaaaattaattgaaaaagataatttttctaaaatttggtataaatcaaatacttcattaagtggtccaagatcttcaattacaattaaatttaatttacctggttcaacttcaactccgcttaattcattatatttatcattatttgttgaaatgttagatgatgaattaagttcattatcatattatgcatcattggctggtttacattatagttttgatattgctagagaggggatcagtttagaaattattggttattcccataaacaagaaattttattaaagaagttaattgaaacagttaatctgttcacaagtaatgattcaacatggaatgaaattagggagaaacgttatgaaattttgaaggaaaaacttttcagaaatttaaaaaattttggattttcaacaccttatcaacaagttggtccaattatttcttcattggttaatgaaaattcttggttagttgatgatgaaatttcatgtatgggagcagttgattttaattcattgaaaaattattcattaaatctttttaaagtttgctttattgaagtcttatcaattggaaattttgaaaaatcagattctattaatattcataatattgttaaagagaatttaccaacattaaatagttcaatcacattaacaagatcacaatttactagaggtagatcattaaatttaccaaagggtaaaacttcacattatattagaccaaatgatgatccagaaaatataaattcatgtattgaagttttattacaaattgggcttatatcaaatcatcgtgaaagaattttgaatgaacttgtaagtcaaattattcatgaaccatgtttcaatagattaagaacaattgaacaacttggatatgttgtattttcaggtacaagagaaacatcgtacaacatttggattaagatttttaattcaaagtgaatatccaacagttttatttattaaagagaagttgatgaatttatcattaaaatgggtaactttattaagaataaaatgacaactagttgattttgataaacatgtttcagcattaattaataagaaggaacaaaaaatgaagaatttaaaggaagaaaagaatttccaatggaatagaattgcatcaggttattatgactttgatagatatgagaaagatgttgaatttttaaagagtttccaattgaaagatatagttgaatattattcaaataaatttactgattctaatggaaatggtaaattaattgttcatttacaatcacaaaaagtaccaaagattgaaactaagaaatttttgaaaagtataatttccaattttgtttacagtaaggatgaatttgatgatgttaattatgagagtgacaaagttaatgaaaaaattgatgaatttttccaagatgatgttgaagatattactggaaataagttgaatgaactcttccaaaatgacattttcaatgatttcccatataagagtgaaattatcagtcaaatacttgaatatgttaataaagattggaatagttatttcaattactgatggagagttgattggtgttgttggagaatggaaatgttctataccattaacatcaacacctagtgctaagattgaggaggaacattgtgatgataatattgttattaaaaataagttatagaaagataaataagttatagataagactttatagacgattagattagattagattagataatagaaattaaaaaaatgtttttcttaaaaaataacagccctatttaatcgataaatagggaccaattttaattgtaatgattataggtatgtttctttctgtgtgtgttgggtataagagtaatcatgagagatgttaatgattataataatcatactgttaatgataatgatgataatgatgataatgtcattgatactgagagacagagtttattgacgaataatgataatttacataacaattacaattcaatattttgtaatgaaagtattttaacagatgatgaaccaattgaatattataaattatggagaaaacgaatgtattggggtattagtattttacttatactaataattttatcaagtattgtttatgtttatttaattttaattattgaaagtattgcaataaatgttaaatttatcaaaattgatgatattaataataatggaataattattgatatgaatcaaatacaagttgatttatctgaaattaattggatcaatgggatgaagtttagttttagtgatgatattaaagtgagtaatgataatgaaaatgaagttatgaatattggtatgaaggggaggcagtttgaaattaatttgactgggaatgtttgggaatttgaaataatggggttaaatgtggatttaaactctaatgaattacctaaaattgttaatggtgaagtcgatccattatacgttgattttaagatagattttcatgcgattaatataccaattcgtaaatctataatgttaaatgatgaaaaattaagtaagataactaatggattgattaatgaatatctcattactttacaaatattggaattcaatttaaataaatatgatgaaaacaatgggatatttggtgatttattcttttcaattgaaggaatggatatgattccacgaattgatatgattattggatttaacattaatgaaacattttacgaatttgttaatatggaagtttggaaattcaacaaaaataaagatattttccaatgtcaatttaatttacctaatgttaaaaaggcagatcattgaaaatgggataattaatgatttaatttggagattatttaatgatgatagtgaatattgataaatttaagatagctatcaaaggtaaggatatatgtcatgataataatgataataattataataatgataagattccattgtggttatgtaatacatggtctaatgttgatttagagataatgttaagtatttatcaattggttaaatttaagagttattatgattataattctattcctataataccagaaaatgaatttgaaattgagaaattacttattgggtctaataattcattatttgtgagtagtgaaattaatactgtttataaagatagtattataaatgaatttgaaatagatataaatggagaagttagtttcagtggtttgaaattaaggattaatggattaaaaattattagatttattaataatgaattgaagttaatgatacaaaatgtggattttgatatcattaatgtttttaaagctaaagaagttttagaatatattatttatgaagaatattatgattatgaatttactgatgatatgaaatttgatattaatagtatggttaattgtaaatttttcaatggtgaaattaagttgaaagatgatattaaaatgaatgttaaatggttaattaagtatttgattaggtatctatgataggggaaatacattagaggataaaaaacagggtattgaattagttgaagttgaatatatcgaaggagatttaaattatattaaatttgaagttgggatattaatttatttacctaactttcattaagaaggtagctaataatattgaattaattaatttaggtattaaacatgaatatagtgaagaattatttgaaattcaaattggtaaatttgagaatttccaaaatataataccaattagtatgaaatgtttcagttaataatggagaattaggataagagaataataattgataaatttgttggagaattcatttcaggaatttataatagtattaatattactggtattgaatatgaaagtaaaaggagtgtagttgggggtgatgataatttatgtgaattagtggagagtattgatataccatttaatatcagttcatcaggatattagtggaggtaatgaggaaggtggtaattattttattagagaaacaacaatgcatataatgaataaagaagttgagattacattttacaatccaattaagaatgcagagattgaaattgagataattgaaggagaagctatttgtgagggtaatataattggatatttaaaagaaaagaatatcaaaatgaatataaaaccaggtatttggaatagtccattaattaagattgaatatgctaaattaggtagtacgggatggaagataatacagagagccatggaaggtaatggagagatcaataatatgattataagaagtatagttaaggttaggataggtaatagttgtcaatggagaggtatgaatatactgtatgagagcaatggttcagttaatggtaaagttagatggtgataattacgtaagacaataatattctacttactttaaagttacttaccttataaaacagaacattatcttcaatatttagtgtatggtttgtagctgctctttttttctatccaatcatgtacttagtttttgattccaataagttttgactgagttatgaacgttttttttgacaaagtcctgccaaatggatattaatcttgagcacttcagacatggcacattgtaatcccctctatttgttgtactgtatatacaaaataaataatactgtaaaaaaaacctataaaacaatgaactaaagaaaaatacccctatatacattaatccgaacagacaatactacaatcatcttcaactttcttattatcaaaacaatatttaacataattatgtgcaaataaacgactctttgttaattctcttaccatattacttctttcatcatctgcccaattatgtgcttgaataagaatcaataaaaagaaaccttcaataatcattgttggagtatttgcaactaattgtgcagtttctgaccataaaagtgcacaacccataataattaatcctaaaactgtagtaacggatacaataactgaccatttatttgaacacatataattaatccataatgaaactttagtatctaatgtaacttttggtttatatttctttaaagtatatgaaataccaataaattcaagcaatccttgtgaatcttctaataaatctaaatattttttgtgttcataattagtaattgaaaaaaaaatttctcttaaaacgaaaccatcaataaatccaactaaacctgtatatgtaccaataattaaccaccaattatcattccaatgcattaaattaccaattccaaaccacataatgaaaacacagaatgtaattattagacctagaccattaccaatagcattagcataaaagctaataattttttgaactttatctcttggacatctttcaacaataattaattcattttcttcaacgtcatttaaaattgttctctcaagacattctaaatcagtatctaacttaataaatgatttaatttgtctattaataatatcagaagatcttgatctaacatgttcaagaaaaacagatgtgaaaagtaattcaattgcagttgcagtattaatatacatttgccaattatttgaaaatttttgcattaatggttgactatctgtaccattattatttggaattgcaccacatccaatccaaagcaaagataccaatccaataaattataacacaatataaattacctaataactttgaacaaacttcagaaactttatcaaaccatgttttcttattctctatatgtactaataaatgcattatctgaattatttaaatcaataattttctctctcatttcatcagttaaaataaaattaggatttttatcttttaacttttttcaataatcttgtatgagttcttaatctactttgtaatttacctgataaaattaataatttttcattatcatccaattgttgtctcataaggaaagtatcccaaacataagtctgaatagattgaccatcttgcatgacaatttgccaagtatcaggtgcaccagtaacagcaccccaaataatccatgcaattaaaatcgaaataacaaaaactaacatataaacagaacctgtaacatcaactgcataaccaatgaatgtatccaatggagatgtgaaatcattatcagattcaaattcctctaatttttcaattttgacaatttcttcctcttgctttttccataaattatgaactttattcggaatgtaatcaattactttcataaatttacttttatttaaactttcaacatcacttgtactagaatcatcagtatgagagttctcaaagaattgttctttttcttcaacacttttaccattagaattaatgtttctcggagtagcaatattacaacgaactttaatgtcacccttatttggtgggattataataaatttagcattcttccaaaatttacttaaaggcattgctattgttaaaagtaattaatatcaatgggtatttaaagcactggatagtttgctgattctgtgggaaaataactatataaaaaacaataaggatataattacatcttttttcatgccgatttatccatatccatatccatatacttataatatgagaaaaaatgagaaatattatgaactgaccctcaaggtttaatataattccaatatcgatatattagtctattaatatataagatatttatacctcacaaatcaaatatcagcatagattaatatcgattcttgtattgaatttcttctaaaattaaaccaatagctgaatctcttgttattaccctattaaggcaaccctggtggtatctccgataagtaacgcttctctgttgaataagaggtcgacacgactattactttggtttaccactggcgaaataactttgagcacttcggacatggctcgaaaaaagattgctgaagttaaaggttgtttttgtgctatttttgggcacttatttttgggcacttatttttaaaaaattgggttttaaatcttaaaatgtatctctgcaggaacacaatttctttttctctttctaacggtcccattggtctttgtcgagctattctgtgggatgccagtaattgacatgccacttatggcagctatgtatattaagtctataacaaaatgaacaagattacgtaacaatattttcataattcgtatagttagataaaaattatacgaatctttttatcttcttcttcttatcttcttcttcttataagcagagacaatatggcggtattttgggatatattcatagtggctgctcttagtcctattactaactatgttaacaataagaaatgtcagttattagaacaacacagtgagaatagtaatgatagagaaatgtttgcttctcattgggttaaccaaactaaaatatatggtaattttgtaagaaactatctcaatattgaacaaagtgataatactaatactgctaataccgctaatactgctaatacacctactacacacactccattatctatggatgatgtccttgatgatgaatactagcctttataatcctatataatcttataataccccctactatggtgcacggaatgaataaatttctctttttctcccacactttttccccatttttttaaagtcaaagtatagattctaaccgttaacttctctttgaaagagtaagtgatttgctggttggaataaagacaatgtcaagtgatatagctcctatcgaagaatctaaaatacctggtaatcattccgctaggaaaattcaacgttggaatccttcctcaatttatgcaactaatatagataatagtagtatacaaattgacactgataatactgataatactaataatactgataatactgatgcaattcataataatatacctttaaatcatatttcaccagctcaaatgtattcaacagattctggtaatatgtttcatgcaggttctatttgtattataatggttggtttacctggtagaggtaaaactaatttatcaatatcactttgtagatatttaagatggttaggtgttcgtacaaaacttttccatttaggtgattatagaaggaaaaataataataataatttaaattttgaaaaattaatgtcaaattcttactttaccccctctccagaaaatttagatattaaattactcaaattaaagataaagaataatatgattaatgatattgttaaatatttttcaaattcaaatggtcaaattgcaatttatgatgcaattaatgggttatcaaatgaaagattagaattacttaactttttcaattctaaaaatataaaatgtttattcattgaaacaattattgataatataaatttattaaatgaaaatattaaagattcagttaattcacctgattatttaaattgggatccagaaattgcattggagaattttaaaaatagaattaaaattagtgaatcttattatcaaaatttagatattaaatcaaattcaaatttatcattcatacaatcctttaattttggtgaaaaaatgttaattaataatttaaaacatgattttttaacaactaaaattgtttattatttattaaatgcaaaaataaaatctcattcaatttattttgctcgttgttcattaaataaattaaattttaaagatgatccaccaattaatgaaaatggtaaaaattatattaataaaattttcaatacattgaaaaatgatttccccaataatgaaattccaaaagatttaatagtttggacttcaactagattaagaactattcaatcatcagaaatttttaaagaaaatggttgtacagttaaacatagacctgaattaactcaattaaatccaggtgcagctgaaggattatcaaatgatcaattaaaggaaaaatttaattctgattattgtaaatatattgatgatccttatcatcatagatatccaagagctgaaagttatcatgatttagcattaaaaattgaaccattaattttagaaatggaaaaattatcaaatgatgttttaataatagctgatgaaacaattatacgtatattttatggttatttaatggcttcaaatgcaattgatataccttcaattaaatttcctcaaaatgaaattattaaaattacttatcatacttataataatcaaattgaaaaactgattgttaatgatattgataatgaataataactataattataccctaatgtcttctttaattttatatatttatatttatattgtatttttttatttctatattctaatgataataaaagctttattccttgtattttttttatttttaactattttacttcataataattttaattttttttaatcagtttgattctttgaaaaggttaaatgttatttttcataaaaatatcatttaatttgtcaataacaactattaaaagtatatttgtgtagcttcataatgtttctaattaactttgttgttaaaatcatgttgtatcaacgctaatacgcaaccaatacatcaatttgtgcttacgtaattgtacacaactacatggagacaaaccaccccttttaaatacgcataactgggcgtgtggcgtagttggtagcgcgttcgccttgcaagcgaaaggtcatcggttcgactccggtctcgtccaatatattttttttaaaatctcagatcttaaattattatttttttaccaccatgaaaaactctctcaattttaaacatcactacgtccaatggaaaataatactttttttccatcaactggttacatcaagatcatacttcccttgaaccaacgagagaaatgttatctggatcaacacgtaacgtatgctctggctctaagactttcttgaagtcatctggtatatctaatttatcatttcaaagatttcaatcaactcaatcaataactgaaacaattcaatcaattgatgaaaaacctgttgaaaagagaaataatagaaataacaaacataattataccgttaatccattaattgaaaaattagataatataaacaaaactcaatataatgaattttatccaatgtttgaagaaattcaaaatgcttttgaaacttatcaatcagatgcaagaagaacttcaccaagaggtttaaatagaattggtaatttattattaactaaaattattaatttaaagaaagagaaaaaaattaatgcaccaacttcaacacttttaaaagatttaattcaaattttatcagattctaaaactcttcatgttagtcattttaatagatttattgaatctttattaattgatggtagatatatggaagctttaacattatgggttaataatgcaggttattttaaagatactccatctgcaatgtttacagcaaatccaaaatttaatcctgaaaatgattatcatttaacaggtttatcaacttatttattatcattaattgaaaataatgaaaataaaattgataatgaatttattaaattaatttatggtgaaaataaaaaatctgattcattatataatttatcaaattatttaaggaaattaaatatacctgaaaatgatttaaattttattttaccattatataaagaatttaaagaaaaatcatttgatattaatagtgaagaaagtttaaaaggtattagaattgcatcagttgatggtaaaattgtttatttagaggaaacaattaataaaaatttaaaattatatgaaaataaaccattggaaattaaaccttcaacaattgcatattatatgaaatatttaaatcattcaaaattatattcaaaatgtattgaaatttggaaattttcaagtaaacataaaattgaaattaatattgaaatttggaatcaattattatttgcattttcatttttaaaaattgataatttatcaaataaaattgaatcaatttggaaaattttaaataattcattaactccaaatagtgaatcttattcaatttatattcaatatttaattaaatcaaatcaaaatgataaagtcaaattaattattaatgatttaagaaataataaacctgaattatttgattctaatttaaaatgttcattaattcaatatttatgtaaaactaaaaaaattgatgaaagttttgaattatttaatatttattcaaatgaagaaaattttaaattaaatattgaaacttttaatatattatttacttcattaataaatgaatcaaaattaattgaagcaaatgaattattaaataatttaattaataataaatataatgaaatttcaccagatattgcaacttggacaaaaattattgatttattaatgaaaaatgcaaaaatttcaaatttatcaagaaattcaattattgaaaaactttcaattataattgaagatatgattaaacaaaatgttaaatttaatactgcaactttatcagttgttgcaactaatttatttaaaaattataaaactcaagatttaggtttacaaattttgaaaattatggataatgttggtgttaaattaaatgatgttgcatattcaaatattttaacatcttttactaataaaggtgatttaacaaatgcattatattattttgataaagcattaattaatggtattaaacctggtgcaatgttatataattcaattttaaaaggttattcattaaatccaaatattaatgaaactttaaaatttttagatagaatagagaaaattcaattagaaaatccaaataatttaaaattattaccaaataaatatacattcttttatttattaactcaaggtatatcagttaaagatgataattttgttaaagttatattagaaaaattaaataattcaaattgtgatttaggtattgaattaccgaaaattttacaatctttaaaggaaagtggttatgaaattccttcacctttaataaataaaatttagttctatataaagtattatctatttacctttcatgtatataatataaaacataacataacataatatatcataaactatatcatcaaaacttacgtaatgacctcaatcaactatattgataatttctcaacatgattttcccactggacgttctatcatcaacaaggtttcttttagaatcggtacacaacaatgaagattaaaaacatagatacatatttaacatcaactaaggaattattagaatctaatccaaataatacaacaatttcaataacttatacacatgttaaaaaaaatgataataaaattagatcaattattaaatttcaaaactcttaataataaatcaggtattgttcatatatttaaaactcataaatccaaagaattttccaaaattatcaatgcattaggacctagaggttgtaatataaatggtaatgatatggatggtttaagtttatcattatcaaatgttaataagaaatgatattattcaaagaagatgaaaaattaccaatagttcaagaacaaacagttaataatgttccagttaagaataatgaacaatcgacatctcaaaagaaaaagaagaataagaagaaaggtaagaaatagttaaataaattgtgtatagtatataattttaatccccgatttttaatattattaacccctaatactatacaaattatacaatttattaaaaatgatattaccaaataacgggtaattttttattttcatcaattttcttttcattagattttaatttatgttgtaaagtttcagctaatttatttataaaatcatcttgattaagattattatctaattttaaattaaaacttgagaaaagatcatttgatgtatcttcattacaaaatggacaatctaaatgttgatcttgatcttgattatgatcatgatcgtgatcgtggtctttattttctttagtattatctttattgattgaatgattgaattcatgattggataattgagatatcagtttttgaacaatatcatctgacagttttgaaatatcaatattattactagaggtattagtgtttggaatagattttctttcttgtaatgatttctttttagccagaagtaattgaatttgtttatctattgaattaacatcattaaaattatcaattgattcaaaattattagaatttttaatattttgtctttgtaaagctaatgaatatttctttaattttaatttataactatcaattaaatgtttaagatctttaataattaatttagattcatttaaattattattcaatgatttattttgagaatttaatgattcattttgattatttatatcctttaatttatttataataccttgaattaaaatatttaattctttaccttcaccatcaattaaacttttattatttaattttcgatatgtgttatcacataatttatcaatttcatcaatttcatctatagttttaagattttccttatttttatacttagtttctttcttttcattagaatccagattcatataatatctattttccaatttacttaaattattattaacataactttttgaatttagtaaatccatagtatcatttaagtcatcattgtctatattaaagtcaagatttaaatcatcatttgaacttttatcattgaatgaaagatttatatttgaaataaatttatcatcaataaaactttcctttataccgttttctttatgatttttagttggacttaaattgattttagatgatctaccaatttcaatttcagaatttaaagtattatcaaataatgatgatgatgatgatgataaaggttttgaaaaatatttattaaattttgatggaacattttcacgtaatacttcctcataatcatgattatcattaattaatttcttgtaatttaaaatataacctttcattgaaccatgtttgaatggtatttcttccatcattgattcataattgtcaagatattcattcatattaattttatcaaacatttgttaaaaataaggcaaaaaaaaaagaatagcttatattatgaatttattttaagaattaatagtatcaaatacaaatatagaatagtaagggtaattcagatagtatgtaataattcagatagtttctagcaaagcctttactacagtaagaattgttcaaaagaaggaagatgtagaagtagcaaaagggaaataaataatcatgaaacgaaaacaataacaaactcgcggtgagtgtagtatagtaataataattattagttaagagagaggttaataagtataaatataaatataaataaaacaaagaacagtagtagtagtagtagtatgggaatcactatagaatgagtagggtattaactttaaagatatgatatatcttgcttttagtattttttgtttattgttttttgcttttctttttttttttggggaaataattctacgataatgaatgataatctaaaatctatgataatctaaagctataataattataataaagctgcaacaattgcaaccatacctaaagcaccattaacttcaattgaacctgcaaaaccagatgatggtaaagtaacaattggtggagttgatgatgaagatgatgatgaagtggtggttaaagttgatgatggagcttcagatgaagttgaagtggtagttggttcgacggaagtagttgaagaggtggttggttcgacggatgaagtggttggttcaactgaggtggttggttcaacggtagtagttggttcagctgaggaagttggttcaactgatgaagtagttggttcgacagatgaagttggttctgctgatgaagttgatggttctgctgatgatgatggagcaacagatgatgatgaggaggaggaggatgatgatgatgaagcagatgaagaagcagaagaagaattaacattagcacccatacctgaacaaatactttggaaagcagaataagcagttgcagaatcaccatttgaacaagttgaatctaaacaatttttcatttcatttgattcatttgaacaaacacaatcaatatcatttaattgattacaagttgaagaacttctaacaactgatgaagcacaagctaagagacaagcaggaggagttgcaacaacaggagaagcaagagcagcaatagcggtgatgattgcaatatgagagtacattgtgtgtagtaaaagaagagaagaataagagaataaaaaactaataaaaataaaacatcatgatagtcaataataaatgaaatgaatggaaatggaaatggaaaacttctctttaacataatgtaatgtaaacaaagaaaagaaattgaaaaagaaattgaaaaaacttctaaaaaaagaacttcgtcgcatcgaccgggttttttattttctcatctttattttctcattttatttgacacttcattcagtggcaaattgggtggcaaattatatgcagtcacttcttcttgttgcatcgtctggtagattggccttgggctttaagtagttccaattgctgatttatcagatgttcatctattacaatagaattagtcaatggagattcagtagttataaaagtctttctacaatgttcgatttggaagaggtaattctccattccttttgaatataaacatctgatatttgtacaaagatttttacaaagaaagatcatattctaacctgatcatttttctgaattttataaaacacaatttaccatctcttctaattttaccatatatgattgaatattattggcattataattttttatcaagtttttcaaataaacctccaaaaaaaagaataaccaaaattattttaagaaaatcatcttctaaagcaacctgcatcaaatccgggcaaataatctaaataaaatcaaaatcttcatctctagagaaatcgggcaaatttttgaatgaaatcatccctaatttgtgaattgtcttagaagacttcttcttggttttagcctttttattcttttgttgtgtttgttttctttgacgtttcctcttattaccagcaacatcatcaataacagtactagcaacagttttagtagtattaactgtagtattcgtcatttgattagacatttgattagacatttgattagatatttgattagatatttgacttaatattggattggaaattggattggaaattggattggaaattggattggaaattggattagacattggattagacattggattagacattggattagagatttaagtcgttttgctttgatttcttcatttttcacattaggaagttaatgatttcttttaaattctctatacatagatttcacattatcagaattttgcacctttcttcctccaactgattgaacaaaattataatccgatgatttatatgatagtgcagctgcagaacacttttattcaatcaattaaatgaatttatattggtaatttttcaaatgcatgaatcatcatgtgcgttggttgatcaaattatattctgaacaaattcattcttagttttatcatctctaaaaaactgctcaatttctttcaataaatgaatgtaagattcttttaataaattcctgccatccttgtcttcaagaaacattatttggaatttcccttgaagccattacaataatgaatgaatttaattcgactaaccaatttattatcttgccatataaagaagtgtcttcataatcttgattattgaaatagaaaggtaaaacattagaaaagatttttgagtcaatagctttcatattactatccatcattatatttgtatttcctttgtttctgtcaacaaaaaatttctttttaagtaacacatcattcaaatatctgaacctatcctcaagcatgggtttataagttggattttctttatagaaactattgtgagtcataaccatcatgattcttttgaatatatgcgagatgcattaaatccggacatgcaacattaattgagtctaaatttaaaattatatacgaatatcatcatttttcccctagtgacaaaaaatacaacagtaatgtgctgaaggaacattaaattcaaaaaataaggcattgccaaacgatcagaaactattgcaacaagatctgcgtaaatagtatattccacgtcttctatttcaatcttcataccgttattatgcaagtcttccaaatctttaaacagcattttgcaagcttcaccattataaccaggaagtttagctcttgattcataaaaaaaaggagtgaaagagaattctttttgttttatgacatgatcaggcaaatcaaggactaataaaagttgagcattcacagttttatgaagtttgttaaacagattggcaccatcagtaaagaaagcttaattgaaacgaaaggtgttatcagttgtttttgcacgacatgaatcacagaatttaccatcaacaaaagtatcgtaaacattttttttggaattgtttcttttagtttcaatatcattcattaattttttgtttacaaagattgaagcaagaaaacttctaatgctctggtagttgcattttttttgctagaattcttgataatccacatacaactttttattatcaactattaatttagcaggacattatgtatagtgtttatattaagaattaattttattgtaaaacagaatacatttatcatatcatatcttatattttaatgttcataaaactatttatgcattatatacatctcctatacacccttattagccgtttgtttagctaatcttgccttacgtctctcctctgccttctttctacgtgcctctgcttgtcttctagcagtttcagctcttaattgtttttgttcctctcttaacctatttttagcaatttgttcctcttgaatttttctcatatattcctcatattcaggttccttattagctcctccaatttcaataaatttaatattacaactactttcatttgttaaaacccaattatcagtaactggattacatgtacatttagcattttgacggaatgaatcttttaatggacatgttataccaactgtatgttcataactaatatcttgaaataaatgaatttcatcttttctcaatattaaactgaaaataattgaatgaattggtgcatccccccatctttcataaaaaaatccacctgctttatctaaataattaacataaccttcataaatttcattattataaatacttaatgatgcaatttcaaaatttgaccaataatgacataaattataagtttctccattatcatcacttataaattcacttaaattatcaacttctttactaaaataatctttatttaatgaattaaaatattttttacttgtttcccataatgtttcaattgtgttatgtaattctctcattgaaattgtaaaaccatatttaataccttcattattcaaaaatttaaatggatcttccattatatcacaatggaaattaacatcaggttcaattctccaataatattcatattctctcataattggatgtttatagaaaaacattgaattaaatctacacatatgtctataactttcacttgtaccataagttatacttgcccattttctactctctctaacttcttttgccttatcttcatcaatataatcaggataactccaatgttcccttggtattaatccatatctagctttaccactaatcatattacttgttaaattaataaattcttcactaaatggctcatcattaaggaaaacccaatcataaccaaatttattattaaatcttgattcaacttgatgaatagttttcaacattgaatataattcactattacgacataatgtaaataatgttgcattttgtcttttatatgatgatatattagtttccttaatattaataattctctctaattcatattgtgaccaaggtttattatcaggagttatatctttcctaattctatcttcattatcaattaatgtacctttaacattatcaccttgtgaacttattttagaaattgattgttgttgtttctttaataattcatcatttttttgcttttccttaatatttttcagctgagctgcaatctcttcatctgtcagttttgatatatcttcatcaaatgtatcaggatcttcattatatactttttcaatataattctcaatttctgcttcttcttgatatttatcagataattccttatttgatttggttttttcaatggtatcattatcattatcattactctccttactctccttattctcttccttaacttccgcagtttccttctctcctacaacattatttaatttatcatctccttgattatataaatatcctcttaaatcactaatttctgttctgttttgtgaatgtaatgcactacccgttatgattataacaactacaaaaacagacacgtataaaacaagtgaacgataccttctcaacagatgcattgtgatactatatacctaactactcaaaagaataaaaccatcaagataatagtaataacaataataacagatcaccttataatactaagacttccatcaatgaaaatttactttctcgcgttaaggttcttttttcctttaaattccgtgtttaatagaatagaatagaatagaatagtgttattatatagaatagtatacaattaattaatttaatcagcatatttttcccaattatcaggttttgtccatcccattgcagagaatagttctttaccacatgcataaccatcaaatgtaaaatcattttccttttcacagaaacatttattaccattatataaattatcttcaattggacacatttgataaactccatgttgataaccaatatctttgaaaaaatgtaatttatccttacttaggaataatgaaactgcaattgaatgaactggtgcatccccccatctttcatagaaaaatcctccacttttatctaaaaattggaaatattcttcatattctttacttctccaaaaatccatatcagcaatttcaaaatttgaccaaaaatgacataaattataactttcacctttatcattactaataaatttcattaaattatcatttggtaaatatgatggattatttttaataaatttttttgttgtatcccataatgtttcaattgtacgtaaaaattcatgaattgtaattgtaaatccataaattttattattatcttccataaatttaaatggatcataattaatatcacaagtaaattcaacgtgtggttcaactctccaataatatttatattcttccataattggatgtctgtaaaagaaacctgaattaaatctacacatatgtctataactttcactaccaccataaattacaccttcattttccattttctctctctctaatttagccttttccttatcaataaattcaggatatgaccaatgttcatttggtattataccaaatctagcattacctgaaacaaatttactgactttttccttaaattcatcactgaaaggttcattattaaggaaaacccaatcataatgataatttttattaaatctatcctctaattttctaacagtttcaataactccctttaaatctctttcttcacataatgtcataattgttgcattagctttttgatattgtttaattaataattctttacccagaaatggatcagtaccaaatgatataccattggttaaatcaatattattattaacattattgttattatttttgaaattcaaactttctgccaatttctgataatttggtggacttgatatactatttccattcctatttgctaatttatataagatcaaaataaatcctagaattgcaaatgcttgaatcactaaagtcttgtatctctggttaaccatactgtgattacctctagaaagaaagatagaaagaaagacagaaagaaagacagaaagaaagacagaaagaagacagagaataaacttaaaagaaaagaaactgttataaaattaaaattaatcaacgcgtgtttttaatagtgtgataattaaatataattatttgattctggacctttccttctttcttatacgatataattgctttgtttcattttgataagggtaggcgttatggtggttagttgaagagtttggagaggtatttgggtgttcagtattgtgtgtgggtaattggaagtgggataattggtttgtcattgttattttattattattactatatatttatcatgtttcaactaatgataggattatattaaatgatcaacttcggtttggtgtcaaatgaaaatgaacatccgtaataaatttagatggatccacaatacaattattaatcagtaacatattaacaaatgaacggagacgggcaaaagtgcatctaatatttttaacacattgaatatattcatcatcatttcctataagaccctttgcattacatgcagcttcgtaagtttcataaccacacttcaatttatcaaaagattttagactttctacaactcccaaaagaagtgaaacataatactgatctctgtatgtaaccatacatgaaacagaagaatcaatataagaaaaagaactgttattattattataagacaatttattatttaggttgctagaagaacgagaaaaatgcatagaacggttaccaataggagtaaagtttgaattataacgtttgaatggttttttatttctgaaaaatttatgcttataatgaaaaccaagtttaaatttattgaaacggtatggacgatagtaaaaacgttcaacaggggttggatgttcaataatattaatccatggatttgttggttttgatttttctatatccttcaatatatcgtgactcttcagcataatgaattgcagcatttaaggtatgtggtttttgttgagataccatcattttcaattcaggggttaaaccaagaagatatctaggtatttgattctttggagactcttcacgatccaactcttcaagatattctttaaataatgaagatcttttcatattttctttcaattgaattgatattactcatgtgttgttttacagagagatatggaagttcaacaaatagagaacattataatttctaatgtaatttgtacattagataatatagttacaaagagtattaaaccagattcattttgtataaggaaaagtttatatagttcattgtaatagaataatcaaatgacatacaccactaatacctttattaaagagataagaaatatattatgttaaatttcatatcaatttcctaattaagttagtatcttaaccttttcgtaaatttataataacaatttagaaactttaaaaacaataatcatgttatcaatataaaataaattaattagattcatttggaatgatcatccatttccactatttaaagacaagatatatcccttcgtttggaattatctttgttcttgatacttcatagaattgttgattatattctatttcatttacttacctacaaggtgaattacatctataaaagctgatattgttaaatattcaattgttgaacttattgataatcgtattgattttacaactcaatcacaataagttatgatacattaatgctttcatagatggtaacttctgaatttacacaataaaatttttaatttatatcatctgatggatggatcattagaagaaagaatttattttgttaattatgaagttgcaaagatatttttaaatcatttgttttttgttcaattagattgatattatctgaaatattcttgaaaattagtgttgataaagatcctaataattacaatttactttataaaagattttcagaagatatggattttgaaattgatgattttgatatgccatattaaaatcaaatattatttatactgatagtattggtttatttgataatcaattatttattaaaattagaaaagatgagataaataaagaaaatttgaaactgattcaatcacaacattaatcaataagtttccaatgaaagttataattttcaattaattagacaattttttattgcatttattgatgaaatgaaagttaatgatatcaaatttaattatgaagtagatgaagaattaattttgaatgcaactggtcatagcatcaatacaaggtatttaaattatgctaataatcaacaagattatcaacatcatagagattctaaatatgaaataacttataaaagaatgatgaaattaaattattcattatgtatgattgattttgatgaacaaaattaaagatcaagaaaaatattattataatttgaatccaatcaaattttcatatgatgaaattgacaatttattaaagaaattaagtttaaatttaagaaatgaacaatttgcggctttatttagtattaatgagtcaaatcataattttgctttacaagctagaactgggtttggtaaaagtttgatatttaatattttattcaatttaaatattaacaaattaaatatcttagttgttccttataaaactttgaaaattgatatgatcaaaagatttgaagattctattggtttatttgaaaatattttaaatgatgttaaaaataataatttgaaaacattttatttaggtatttttgaagattttttcaagataaatatgaatctaattgatgataatttaaaaggtatcattgcttttgatgaatgtcatttaattttcagggaaaatagttttagaaatgtcattaatgatttcaatcaaatgaactttaatgaatttaataaagttttacttttaagtgcaactattaaatttgatgattgtttcaaattatttgaattattaaatatcaaatcaaaattaaattataactctttcattaataagttaccaattggaagatttcatttaatttataaaaatcatttaagattaattgaaattttatataattttgaaaaaagcttcaaagatgataaatgtattatatttttcaaaactaaggaagaattaataaatattaatttaaaatatccaaaaattcatggtggtttaaatgattatgaaaagaattcaatatttgaatcattttataataataaaaataatattatattatcaactaaaattatgtcaaatggtattgatttacaaatcaaaaattcaaaaaatttttattcaattaaagattataataatcataaattttgttgttgtaatatcaatgatgttgaaattaaggatatatataataaagttttcattgaatccaatattgatgtcactttcaaaatattaaaggataaattaaatctaatttcattaaacttgcaaattaatgactcaaatgaaaaatttaatagaattattgaagatccatttttcttttattgttatgatgaatgagttttgaaatatggtgatgatattaaagttttaactgatttattttatgatatttgtatggaaaaatatgatgatgaatcgttagataattttaatagattaacaattcaacttgtttataagattattttgtatttaataagataaagtaatgataacgacgataatatgtagacataccaccatcattatcaatatttggtgaatttcttcacaccgaaaagtaaacccaaaagagaaagaagaagaagaagaagaagaagaagaagaaactaccagaaaaacagaatctacaaaaaaggagggatttcccccactatttatacacgtatttttctgatctttaatattattttttcttatcattcgatgagcatcctctgagggctcatcttcttcttaatcttaaggctcattcttttttgggtataaaaaggtagctatttccactctaacttctccttttcctttttctctttctcttgttgtttctttaaaagaacaaaagtgatgttaaaggttaccgaaagatattctgtatttggtaatattttagtagatacatcaaacaaaaaggccatttcaccatttgctgatgacgttcataatcttcttaaaggttctgaatttgaaaccttgcttgatttcaataaaccttttgaagataataaggaactcgataataaaattattacattaattgataatagtgaaattcataattatgtcgaattgattgaaaagaagattaaaactggtgatgatgatacaattgaaattgctgataatgaactagaagattatcatctgattaaagttttcaaaatctgttataaacaaaaagattttttctttacaactcattatctaaatgagcataatttagctaaaaatggttcaactgttgtgaaattttggttccatagtggaccaaatcatcatgagaataaatatttctatgaaaatacattttttgatgaggtttttaaaataattcaattcattgattattacaaaaaaattcagtttgattcacaagatgaatattcaaatgaaatccttgatttaaatgaataccttaaagtctaccatagtaagaatatacactttaatcaaacaagtatgttagagatttctttaaaatttaagaaaattttaggtaaattaatggattcatctattgaaaattatgacgatcattcaagtaagttttattattatataatgaatttgcatttatttaaacggttatttaatgttgatgatgaattacttattaaaattgaaaaatataaatcattttgctataaatcattatcaagtgataaactagtcgttgataatgagaaacttattaagaaaattttcatgtttcaagaaattttaacttcattattaaacacaaaccaattgtttttagtctgttttagttcatgtttgattaatagtgaaaggagtattgtggatctatcatcagctatcaaaatcattgactcaatcaatagatttattaagtttattttaactttttcaaatgaaaaaaagtttagctcattattttatgatttaataattaaagaagaaaattcttcatataatgttttcatcttgacttataaagaattattgatgaaaaatcgttataaaaatcgtaaattgttctttaaaaatggtattgattcttatcttaatattaaactattcagcttcaatattgaacctataacaaatggttataaaaaattgattgggatgtataatgaaattatcaaacaatttttaagattaaaggtcaagttgttaccaattgatgaaacttttgatatattgagtaaaagtttcaataatactaataatggtagatttgcgaaacaatttttagaaactaatgtcaatgaagtattgaacaattgtttgattgatgatgaacatgttgaaaaaaatcttgaaaaagtttgtgatttattcaataaatgtacaaatgttatttttttattattttacctttcctctggttgtatgcaaaatcaattaaaaaatttgaaagttggtgaagctaataataatttgtttgtttataaggataaatcaactgataaatattatcttcatattaaaattttctcagttaataaacaaagaagattatttattaatgataaagttacaaaaattttctttcattattttttcactattagattactattaggtgaatactttttaaaatttccaattgataaagatattaatggttttcaatcactttttgagagatttgacgaatgtgggttcgaagatgagagacatgaaattttgaaatcttacaaaatttataatgatagttcgagtttttttgataatcaattgttcataaagattagtaataaaagtatgacaaacgttgatgataagagtattgcaatgtttaataaagaaatttttagtgatgattactttaaattatgctcatcaggaattctcgaagatgattattagtgaatcagaaataattacgtaagctgatatagtgcaacactgttattttataagttggttggtagtatgttatttggttgtatattttatttattgctctttattgttctttatattacaacaagtactggttagctactacatatagatattttaagagttaagccaagttttggaacttaactatattactgattcagtcatatttaaacattttgaaactgaaaatatgttgaataattcaactataaaatgaagagatgaacaatgataatgttcatatgtaatcaattattatttgtcaatatattgagttatctgtatcaatatatttatatttttgaaggatcctgtttttgattacatctaaccacaaactaaataatatctgctaactttgttgttactataaatataaattagagatctccataagattaaacaagtacatttagaagactatgctataaatgtcatttacgtatggaaaattctttttgagtttccattggtttaaattcttaaagattcaaggtgatttaaatagtaatgaaaaatctagtaataaagttgtgctcagtggtttgtgaatatgacgcattgaaaatcaatcaagagataagacatatgttaaattttatatcaatttcctaattaagttagtatcttaatttgaatgatcactttatatgtgaaggctcattgaatttccactatttaaaaacatgatatgttcctttcatttgaataacattggtccttggtacttcttttctataatcaaaagaaatataacctaataacagtttaaataatggaatatagaatatacgattgtgatgcatatgatgttgatgaatttttatcatttgaagataattcttgtaatagagtaaaagaaattccaagaggacttgaaaaattcatcataagagaggaaaaatactatatggaatatagtttcattaaaattaattctaaaaaaattatgatttacactactactacctatgaagagaaagacagatgtctttcaaaattgatggaagaatggggtttaaattatgttccaaataaaagagatgcaattcgttttgtaccatcatctgctggttcaatgataccaaaaggaaatatcagtaaagtaaatgagcctgatgtactagtttcttcaacatccgttaattcaatcaatgaactatctaaagatattggtaaggaagatgataaagatgttgataatgatggtaaaaatttattgacctagcttatacaaactcagctaaaggatagttttaaatgattaataattataatagtaacaatctttttataatcgttctttctctcttctataaaacaaacttcaaactagttgttcaatcttagttaaagtcatacgtacatacaaataaatgtaattacatagtggcaggggctttaatgataagaatgctataatgagccctcaaattgataaggatgagcatttaaattgatgaaccttttcctttttctttatctttcttctacttctttcttttccactttgtttcttcttcttctttttcttcaagatgatttaattttttttcttcctgtatctactcaatcattgttacaacacaaggctcttgcatgaaactctctattatatctaccatgtatctaacatcattaattttgaaggctcatcactgatttttctacgcgttaaataaattaacggcggctcatcaaaataattataccgaaattacatgttttactcttatctttaaggaaaaagctattaatatcttttccatttacacggtataaatttaatttttgattctctatccattgatggtattttgaatataggttttagttgcaaattaagaaaatgaaattttatagttgaagtactcagaaatattaaaatgatttaaaaccatgtaaattcaatgttttcaaatgcttgaaataaacgctttttactataactaagtgactagaatacatcttagagtgtttctaataaccaatatcaactatatttgatggcaaactacttaaaagtggccgaaatgttaacaaaatgtgaaactatcaataacaagcaacaaataccatgtcatgacttatctaaggataatctttaatccattgaaaaaataattttttgagaaaagtacccttttttcgggtatttggtatttttatttattttatgatggtactttctcgggtatgttaaatgatggttattataggttattagggtcaactacagcatgataaacatgataaacaaacaactttatattaccagcttcttttaagaatttagcatactcattcattggaaactatatgaactttaacaatcaaatgtattattatacaggttagtgatattgcagtttagtatttgatagatgaatcattacttttcagtcagtttgttgaagacactgttataacgaaagtagtagggtagttattaatagtgaaagttttattctaatgatgaataataataactaagaatacttaatcaatgaagataattgataaataaatggaatatcaggagttttatttataataataatgataatagtaaataaattgagtttcagaaggagagttccactatgataaacaatatgttagagctcgattgtaatataaattagaatatcaatattaatattagatcacaatatttaattaaaagtacaaattgattccaaattataatattagttcaaagagtcattcatgccagattaaaaatttgaatcaataaatcaataatgcatggttattttaatatggtgacatttaagaactaaacctagtaatgctagaatatgattttaaataagattataatactactttgaaaaatcagaaaaaatatatgcctgattataccatgaaattcaatacctttatatgataaaaaatttaagaatcaaacataataatatgagaatatgaattaaaataaaaaagcaacaagcttcagaatagtatgaaagtaatgaagtaatatatcatatgctaaatacaacagcttttattcttatcaaaaaccatttttcatttaccattttgcttcttaatgtacattactgaatatcatatatgatgctaattttaatagttgtgaaaactttgccaattaaaattatcatcaataaatcgatatacaacatgataaaagaatatattctattaaccaaaagagttgaagatttaaacgataaaccaaaaaatgctaatggtgaatcaaaaaaatcataggtgataaatatttgagagttattataaagcattaacaaataataataaaactaccagttcatcaaattagaaactattctgtgttaacaagaatgaccaagaataatggtattgatgcaatgtatcttattgcaaaacgtgcacttgaaactgttaaaattaatttaaatgctgaaataaataatgttggctatattaattgggaatcttataagaatgatttatagaaaataagaccaatagtataaagcgtgccaatctagtatgagaataaagaagatcaatggctaatataatggtatttgtaataatgttaacggttatgggaattataaatatggttgattataaaatttatagctatattgagcaagtattgtttgttttattacataaactatatacaatagatactagttttaaataaatgataacatctattttaaaaaaacctattactaggtattaatcgaatgcaaaaatggttatccaaacatttttactttccaagaatgttcccaattattgaagaatatgttgaaagtggcaaaacctgcaattgggttaatcctccaaataggactttaggattaatgcagcaacccactattccaatcactagatggtcacatataagcatggatattgtatcagggtttacttcagcaagttttcaaggtagagaggtagattcagcattggtaaatttagatattttttcaaatagagtgcacttttacccaatttccaataagttatctggagaagatatttcaaaacttgcaatcaccatcaaagcaacggaacgtatgatacgttctttaccacattacttgagatccattgtaacggaaaacaaagattgggcatattacattccagctgctgaattcaccttaaaatcaacaccatcaatggcattaggtggtttatcaccattcgaagtcgatatcggttatgtaccacattcaccattgacgttaagctatcaattatctgataaaggaggggttatagatgaaatctcagaaaattttgaaaaatacgaaatcactgctcgtgctgctagaaatttgatattcgaaacaaataaagcaaaatttgattcaaataaaaaagaaggagagttagaagaaggggatgatgtgtatatcccacaagatgcattatctaaaccgggtgacgtccataacagaaatttagtacaagcattcaaatccaaatatgtgggtccatacaaagtgattagaaaaattaatgcagtcaattatgaactagaattacctagtagttctaaatgaagctcacctttccatatatctcagctgaaaagacaaagtgcattaccaaacgcactatttacagctcctaaggttaccaatccactctatgaatacagatatatatcaatggaaatagaactagaagaattgatagtaatttataatttcctctttattgtaattaaatattgcaaaacatgacatcaaatcccatcaacaacgggaagagtgtatactatacctcacctctgtgtaaatggacctgtgtaatcagtatagccacgtctataaaccaaacaatacttgtgctgaaaagaagtaatacaagaaagaactcaaaatatccaatcaatgttgtccacagcttttcatattatgctgccataagcgcgtgattgtttataaacaacatgtttaatgcatgctggtttatcattgtttattgttgttttttgttgtttgttgttatttactgttgatttattgatcatcacaactacataaatagtatcatttgatattgttcttagtgatggttgtgatcctaatgaaaactttggtattggtatactagattacagtttttcagaaagtcttttagtttatttcagcaaaagatggtttgtttattaaaattagtttttaaccaatttatctaagtgccaaacctggttttattaatgatgattccaaataatatttaattataaagaatactttggttactgttaagaaaacttttaaagaaagttgaatgactgaataaaaacttatcaaggagcacttggttcagtaccatcatctgctgattcaatgattcctgaaaggaaatctagtaggttaaatgataatttaaatgatgaattaacaattgttaatgaagattaatatgttatattttgtcttgatttagtttgcaataatggaatttgctataattgtggtggtatattcaaatataatggacaaggatcaaaatttgaatttttagaaaaaattaaagctgataatacttatgataatgataaagattatatgaatgatattattaaatttttcattaaagaagattgtttatttcatttatgttcaatggaaattatttcaagatttaaaaataataaatatggaaatagtagctattttaaatgtttctttacaaatagaaataatcaacataaacgttattatgtattcatattttaaaaattaatcttaaatatatcacattaagattaactttaacaagtttagttataaatcatattatatcatatacttttaattaaattaatttgataaaaaaacaaattaaataaaaactataaatcaaacaaaaaatgaacaccaacttattattagaacaattaaatgaaaataccttagttgttaatgaaattccaaatggtattaaaactaaaattattaaaaagaaatcatttttcattgaatatggttatgttaagtataataatgtaaatattcttataacatgtaagaaaacttataaagaatatttttttaaattagaattattagaagaatcttttagtaatatttcagtttctaataatacatcaaagagaactgctattagttctgttccatcatctgctggttcgatgattcctgaaagaaaaactagtaggttgaatgataatttaaatgatgaatcaactattgttaatgatactaatgattatgaatatgatgaatatattaatgataatacaggtgaattttcatcaattaattttaaaaaattagatgattattataaaaatatgaatctaaattcatttgatttaagaaaatttagaacaaatttatcaaatttaagaaaaagaattgatcataggaaacaatttagaattagagattctactgtgcctgtttatggtaaagatgttcttgatatattattttccaagtttgataaagaatataataatagattcaatcatttaattaattattttagagaagatgatgtattatttgaaattgttgtttatgaaattgagagacgattttcatttggtagagacaaaatgatttgtaaaacatgttcaattggagatcgttttaataaacataaatgttgtacaaataatataattttaatatttatttatgtgaaggtttgaagaatactaactcttcaagatgttttgcttttgaactttggttttataatatcaaatgaaaaaatttccctaaagaacttgaaaatttattaattagtccgttatactcattctattatcaatattcaaatatggttatgaaaaatgatttgaaaactaattcatttatacattatatgagatttgatgatattgataaagctatatttaaaactttaaaaagtagtttcatgaacttccttaattattttataatttgtttacttctttaatgaaatcttatgtatcttaaatcaaaatcatttccacttgaaaaaacattaattactctatcgttttctatcaaatgaaaatagtagaaatagaaatagaaatagaaaaagaaatagcaaggttgataaaaattgaaacaaaagagaagagtaacaacagaaagaacaattataataattagaagaaatgatgatgtatttatactccaaatctgggcttccaaagataagaaactgtgttaatttttgaatcattttcctaatctgtgatgatttcctaatctggtggctatttcctaatctggtaaatgtattcttcttagcaaacaccatgcattgtaatttataacttggaaacaaattcatagttatttgtaagttatcaaagattattagaacttaaatatgggaaggattatcttaaacttcttaattatgttaagggtgaaaacgaatttattatatagctgataaattgtcaaatatttatcaataaaatatctgtcctgaaaaactgaatgataaatttacacatcttacaaagtttaaagctaccaataatcaattacatcaatgaaaaattgacactttttattaaccttcaaatgattattcagttatagattttaatgttggtaaatttaaagacatacttaagaaatatggtaatactgatgataaaagatttgatgatttgaccaataactcaataatgttaatgatgatgttgattataggataactaatcccaacgaaggtacttaatctatttgaagtgattattcagtcaataacaacaatgacttcaataaagttgatatatcgttaacagcgatataaataatcaagcagtaaagttaattgacaatttaattaagttcattctccaaagtaacagttaataataaatctaatgtaagcatcaaattaagtgaaactatttcaactgaaaatggtagtaccaatcaatttcttattgaaaaaaaactttcctcattaccatttaaatcaagcgaacctcatgtattataattgtttacttcaacttcatcaattggaaagattgaaatggattaagtaatactaataataaatgtggtctaactatatttcttgatagtgatagtccaaataattatgttttaataaaatgatattgcaaaattataagaagcaatgtaataattttttctatgttaaagtatttcagaaaatcaatttgataatagaaaaaagtattattcaaaattttatatttcatgatcgaatattttaatcatcttgattttattgaatgtgaaaatgatgaataatttttaaatgttgaattgaatgaaattttcataaacaataatattgattcagctttttagtttcataatgattatcaaaatagatatatacatgtgattgtagatctggtttcaagaaattattaatcaattagtgttatgcttcgaaataatggcgtttcagacaatttagttaatttaaattcatatttaccaaaatgcattatatgtgaaatgtggttgaataaccatataattgatagactgccaaatgaattgatttcaattgatgatagtccattatataagtatattttaaacctctatgatattgatattgaatcttatttgaattatattagtaagatgaatcttctttgattatgtattgtgtattgttatgtatctcccatttcgctggaaaaaataacattttgagaaaagtatgcagttttcgggtatttgataaaaaataatacttcaactgcctcgtatttcgtgtacttttttttaaaagtcaatttgagccctgactaggtactgtaattacatcaaatgaaataattatattatctacttacaggtagttttaaaccatcaataacattgattacaaactaatctgtgtatatttattagaaagagaaaaactactaagttctaagtacagaatattaatttttgggttacttattaaattattgtgaaaagaattttctttagtttattaatttagccactatctacacaatcttaagttatcttatattatcgaacaatgatatcatatctattatagcttttttcagttgtaactaaggctggtaatccttaaatattctagaggttatcattacatctaataagactcatgcgtatcactatataatatgtttacccataacttatcaagaataatgcccttatttcaactttaactttcttctaatgtattagatcaaatattgcaatattataaattttttttctcatttctattatcaatggttttccagacataaccaacatcagataaggtaaaaaatatctctttcattgatttcaaactatctcattattattttaagtaatgtttcaattgctattttattgtatagtattaactttctttaactttctttaactttctataaatttctaattcaatttttcagttcttctaattttgatttctataagtatgtgtgtataatccatttaatattaacatatctatctgcataacaatcgatataagttcataaagtaatgcaataacttgtattgaacatgactctttctgtacctaaatattttttgcattatttaattttccattttgatatacatgcttcatctaaccgactaaatcatatctttaaaaaatgtatttgtgttgtatacatgatccattttaccgattaaataatatatatattaaaaacaggtgtttcattaatttgtttactcctcttgaattttttctctaaacatgaatacataccagtaagtctattgatattcatctgtttaaaaatgattaaaacaattattattaaacaaattattttagacaattccagtctcttttttagtaaagacactgtttactttccaattatactaattataaattttcaattattgtagatctcccacggaaattaattcaaacttaccataattcaatcattttttaatatttttgaaaactaatttgttattacatcatagatcatttttgagtttgtttgagcaattatggcaactgagaatgctcttcagaataaaaaaataactcaattaaattcaaaatgtcatgcacttgaaaatgttttttttaaagaacttttgtttcaaaaaaacttccctaatctaatgtattcttttataaaaaataatttgataaaacataaattacagttaaaacattgaacacagtatgaaatctgcgatggaattaaaaaatgtaagacctctatgtcctattccacctctttcaatattcaagtttgaattacgccaagcaaacgttttttatatgctttaattaaaactttaaaactataatactactactgacactatttaattacaaaagttttgtaatctaagccattgaaaaaaccactagctcagttataatgtataacttgatagtacaaagtatagccgagattttgcaatcttcggatagagattttttcaatttaagcgaaaaaaatatacttttctcaaaatgttttattttttttgaatccgcacatttttcaaatcttcttttttcacagctgtagaattgtgagtttctacctgttcgaattttaatagggtatattcattatattttcgttcgaatcttttaaaaaacttaaatctatgtacccatcatcaaatgatatacaaaaacatgtaacggaatatttttaaggactaaagctctcactttctcaactatcattatatagcattaatatattttacatcaactatcttcacttctaaagtgattatgttgtaagtagagtaaaatctgggtctttttgagtctttttggctatcatttgggcaagtttgcaaattgggatttgttagaaatgcatgcacggctgacggctcagcagcattgacaaaaagaaaaacttcacctcgcgctcgaaaacatggcacgccaaaacgaagtccaatttaactcctgggccccacgcgcaacgcgcgctgcgaatttttggcaagattacgcagtccgggggatatacatgagaaaagcacttaaaaaatgcggttcttagcggtgttttgcaccgataggccaagatcccacggagagtatgcaggggcgtctacggacaagcctgggtatggccggggacaagagacgcaagtcttggacaggggcattgtggtcttgcgaccgtggtgcgcactgacggggccggtgggttgctagctgatagccagcggaccactaggtttattggggacggggttggagatgtagccgtgcaaacgtgacatctgggaccactctccactgaagcggacgaagctgtactttgtacaggggacctccgttgaagaaagtcaaacagtgctatgtgtaggttaatccaatcatcatagcaaaactcatctgagcgtagttatctggttgatcctgccagtagtcatatgcttgtctcaaagattaagccatgcatgtctaagtataagcattatacggtgaaactgcgaatggctcattaaatcagttatcgtttatttgatagttccgttctacatggataaccgtggaaaatctagagctaatacatgcgtaaagccccgacttcgggaggggtgtatttattagataaaaaatcaatgccctcgggccttttgatgattcataataacttttcgaagctcatggcctttgtgctggagctggttcattcaaatttctgccctatcaactttcgatggtaggatagaggcctaccatggttttcacgggtaacggggaataagggttcgattccggagagggagcctgagaaacggctaccacatccaaggaaggcagcaggcgcgcaaattacccaatcctgacacagggaggtagtgacaatatataacgatacagggccattggtcttgtaattggaatgagtacaatgtaaataccttaacgaggaacaattggagggcaagtctggtgccagcagccgcggtaattccagctccaatagcgtatattaaagttgttgcagttaaaaagctcgtagttgaactttgggcctgggcgggcggtctacctatggtaagtactgttgcggccgggtcttttccttctggctaactcttcggagtgaaccaggacgattactttgaggaaattagagtgttcaaagcaggcctttgctcggatatattagcatggaataatagaataggacgttatggttctattttgttggtttctaggaccatcgtaatgattaatagggacggtcgggggcatcagtattcagttgtcagaggtgaaattcttggattaactgaagactaactactgcgaaagcatttgccaaggacgttttcattaatcaagaacgaaagttaggggatcgaagatgatcagataccgtcgtagtcttaaccataaactatgccgacaggggggtatagtgaagtaggttgcagggggggtatagtgaagtagtgaagtgaagtaggtcgcagggggggtatagtgaagtagtgaagtaggtcgcagggggggtatagtgaagtagtgaagtaggtcgcagggggggtatagtgaagtaggtcgcagggggggtatagtgaagtagtgaagtaggtcgcagggggggtatagtgaagtagtgaagtagatcgcagggggggtatagtgaagtaggtcgcagggggggtatagtgaagtaggtcgcaggggggtatagtgaagtaggtcgcagggggggtatagtgaagtaggtcgcagggggggtatagtgaagtaggtcgcagggggggtatagtgaagtaggtcgcaggggggtatagtgaagtaggtcgcagggggggtatagtgaagtaggtcgcagggggggtatagtgaagtagtgaagtaggtcgcagggggggtatagtgaagtaggtcgcagggggggtatagtgaagtaggtcgcagggggggtatagtgaagtaggtcgcagggggggtatagtgaagtaggtcgcagggggggtatagtgaagtaggtcgcagggggggtatagtgaagtaggtcgcagggggggtatagtgaagtaggtcgcagggggggtatagtgaagtaggtcgcaggggggtatagtgaagtaggtcgcaggggggtatagtgaagtaggtcgcagggggggtatagtgaagtaggtcgcagggggggtatagtgaagtaggtcgcagggggggtatagtgaagtaggtcgcaggggggtatagtgaagtaggtcgcagggggggtatagtgaagtaggtcgcagggggggtatagtgaagtaggtcgcaggggggtatagtgaagtaggtcgcagggggggtatagtgaagtaggtcgcagggggggtatagtgaagtaggtcgcagggggggtatagtgaagtaggtcgcaggggggtatagtgaagtaggtcgcagggggggtatagtgaagtaggtcgcaggggggtatagtgaagtaggtcgcagggggggtatagtgaagtaggtcgcagggggggtatagtgaagtaggtcgcaggggggtatagtgaagtaggtcgcagggggggtatagtgaagtaggtcgcagggggggtatagtgaagtaggtcgcagggggggtatagtgaagtaggtcgcagggggggtatagtgaagtaggtcgcagggggggtatagtgaagtaggtcgcagggggggtatagtgaagtaggtcgcagggggggtcgcaggggggtatagtgaagtaggtcgcagggggggtatagtgaagtaggtcgcagggggggtatagtgaagtgaagtaggtcgcagggggggtatagtgaagtaggtcgcaggggggtatagtgaagtaggtcgcagggggtatagtgaagtaggtcgcagggggggtatagtgaagtaggtcgcaggggggtcgcagggggggtatagtgaagtaggtcgcagggggggtatagtgaagtaggtcgcaggggggtatagtgaagtaggtcgcagggggggtatagtgaagtaggtcgcagggggggtatagtgaagtaggtcgcagggggggtatagtgaagtaggtcgcagggggggtatagtgaagtagggggggtatagtgaagtaggtcgcaggggggtatagtgaagtaggtcgcagggggggtatagtgaagtagatcgcagggggggtatagtgaagtaggtcgcagggggggtcgcagggggggtatagtgaagtaggtcgcagggggggtatagtgaagtaggtcgcagggggggtatagtgaagtaggtcgcagggggggtatagtgaagtggtcgcagggggggtatagtgaagtagtgaagtaggtcgcaggggggtatagtgaagtaggtcgcagggggggtatagtgaagtaggtcgcaggggggtatagtgaagtaggtcgcagggggggggggggggggggggggtatagtgaagtaggtcgcagggggggtatagtgaagtaggtcgcagggggggtatagtgaagtaggtcgcaggggggtatagtgaagtaggtcgcagggggggtcgcagggggggtatagtgaagtaggtcgcagggggggtatagtgaagtaggtcgcgggggtatagtgaagtaggtcgcagggggggtatagtgaagtaggtcgcagggggggtatagtgaagtaggtcgcagggggggtatagtgaagtaggtcgcagggggggtatagtgaagtaggtcgcaggggggtatagtgaagtaggtcgcag

SEQ ID NO: 8 - DNA, 112453 bp, Pichia kluyveri
  >Nicaragua_Y298_000008F_chromosome
actagtataatattgaaccacctgtaactctacgaacacaccacatgttcactatcttagacactactactactaaagagacacaggagaacacaaccatgtatctaactacaagaaacaacccttctacataccaaactacacccccctcctctacgtacttaggggtctatatctcgacaaccagaccacttagagactaatgaagtagacagttttcatctactcatcaaccccattacaaccaaccatctacataccatctaactactctacagcaatatctggccaagtcgcatgaaacacgccatttggcacctgtcagaaaatgcgacttggcaatgcgacttggcatcctcatacaaatttgggaaattttttttgccaattcgctgactttcttagtcttttcttaaatgccatattacgttagaaaatggccatattaacaatgctaactttgacctttaataactacaccatttcttaaccaaatcaacttctacttgctgcattgaaatcaaaaacttctaattaactaaatctagtaaactgttgctaaaactagatataataatattaaattgctaaattaccataataaatttcaaaaaaagaacatcaacctaaattgaacagtttgaaacttataacatattaaatttatgttttacaatcaacagcagcaactattacaaaatttaattaacaataatttaaaatcgatgaaataaataataaaaaagtaatttttaaatttcacaatttttaattacaaattgccataagttcttcaataataagtttttttgaatgaaactcaataataaatcatcagcaaacacgaacaaacaaacgagtggttcaactgagtcaaacggatgtgatgttaatatgttgctaaaattgccatactaatttcaaaaaattgaaaatggaataattctatcaattttaaacattaaggtaaataatatagttatttgcaatcacaaacactaactaatacaacatctaactaacacgaatttaaaatcattagaacaactattaaaaagttaattagaaaaaacacaaaattttaactttcaaatgccataactttacaaatacgaagtatttttaaatgaaatttaatacataatgatcagataccatgaacaaacaaacgagtgtttcaactgaatcaaacggatgtgtggttgatatgttgtctaagttgccatattaattttacaaaaatagaaattgaaataactttatcaattttaaatcttttactaaagagtttaataagttttaataaatagcatctactaatgcaacatcaacttagtctgaaatcaaaatcattgaaacaactactaaaaggttaattagaaaaaccacctttactcaactttaaaatgcaataactcaagaactagaaaagcaattgactaataagctactaatacagaatggcaagacagagaagaaccattaatgactttacaagaacaaaataccattaactagtgtgtaattaatgtataatctgtactactactgtgtaactaataaatctacaatcccactactactactaataatccctaccaaaaacacgattacgtaaccctttgctaagaaaaaaaaccgaatcctgaaaaaaaccgaatccctatgtaaaaaaaaaccgaatttcaaaaccggatccctcaccctaacaaaaaaaaatttcaattttccaaatttcggtccgttttcttagcgttttggaaaattacaatagaggtgaacacatacaagctttaaaaagcaagaaattagctgtggtacataatagccatgatttggcggctcagctgtttacgacagatttcaatgttgctcacttaggggtgtgtatttcgacaaccagaccacttacagactaaccactcacatagttttgctcgccgtgtcaaactgagtcagaccagcaacgacacaaccaattatctactgacattttacaaaagttatttttgaaaatacaatattttgacaaaaagtcaagtaagacatgaaaaaataaaaaataaatacttcgcactactaaaatttccattcggttgaaaaaaaacgagaaggacctgtaaaaaaaaaaccgaatgtcaaaacgagatggcccgcgctagaaaaacaaaaatcataactacggccattccgtccgttttcttagtgtttttccattatacactataaggtgaattaggataattctgattggttggttacaaccaattaacaaaagaggaaactcttgcgaagttgaagagttaatatttcctaattaggaaagaggggagccggcgaagtcgttcatttacaacagccataattgtcagtttgtccgagtggttaaggagaaagacttgaaatcttttgggctctgcccgcacaggttcgaatcctgtagctgacgtaatatttttttcatttttttataaatactttataactatttatagtcattaaattataaaatttataagttaattaattaatactagttgacataattttttttccatctcgatgttttactgaatcctacgcgacaatgaaaatttcttactaaattcctggatggttcttgaatagtaacaactcacgcgactttaaaaaatttgttcaatatacaacaatattttatgtcataaaacacatttataaattatattgagtgaatcacccggaatactggatggttcatgtacgttttgggcagtattaaatgatagtaatcatatccaatgcgtggcagtgaaaagaatgaatattatcaagttaaaaacgtaaaatgaacaaaaataaaaaaatttcattttttattactaaaccttgttaaaataattttttatttttcaaatctcttattaaatttttacttaattacaagttattgtaatataaaactacaaaaaacgagtttacaaaccaatatataaagaaaaaacaccttaaattatgtatggtcatgtgtctattcagaaatttgttaaataatgttaaaatatattactattccaatttcaagtgttttgttgtaatatagtaactctatatccagcaataattttataataacagtaaaatttcttgaagaaagtaaataaaacaaaaaacaaataaataaattgaaaattgtaaaaaaataatcttagcacattacacacattcttcttttccaacaatcaccaagttatttttaacccactgaggtaatccgaatggtagtaataattgtcactacaaaacctcaaaaataaaatggctatatccttttgtatttttctgacatgaaaagctaacttgaacaccttgtaaaatttgttatcatttatcattattaaaattctcatcactttcacgaactcaagtgagtaagttacaaaagtattgttctagttacaaaacattttaaaggtttaagttctaccctattaaatagtaataaaacttaattcacaactgcaactaatcttgttggtgtgaaaattttagaagttgcacgtttagttacaactaaatgtgttacaatcacttttgtaacaatcaattagaaactttaactaaataatcatatttaatattataaggttaatattgcgtttctaatgttccatattgttgtggagtaaaggttaccctatattttaaataaataaattttttcatgcataagaattatcatttatactttaattattaatttaataaccttaaatggtagtttatgttgtatgttttatatttttgtgttttcctggtatatattaaacccagctgaaacagatagagttacgaaaagttatgaaaactattagataatactaagtcacagaattagataattacatatgaattacaatactaagttgattaagtataagactttcatatcctctccaagacatttaaaggaatttactctgtgtttttcttactgctcattacaaaacagtgcattgaagaatattaatgcctacactaactaatctattagttatattcacttacattaaatccagtctcaaagtagtttatcattattagcaaatattaatattggtaattaattcttattgatgtataaccagtgtttccacataacttattattccaaattatattgtatcattaaaatagatttgtaatgcctcaaatactcggttttttaaaaaatctataactcttatcaacaataaattgttatctgtatgggccacacacttaaaaaatttaaaaaaaacttatccgaaaatagccgaaatttaaaaagccacaaaatcccaaaaattaaattagccgaaaaaatggtacttttttgaaaatgcttttaattttttttatctaaggatcttagacagtgaatttcattaaacctacttaacacatattatgctatgataattcaattattgatagcattagcaagttatataagttatacatattgaaactttatatttaattatttaatttgttaatatttatgataatatattatgttgaggtaatgtaaggtaagataaacacactaacttcacaactactatatgaactgtatactgttataccaatttatactcaataacttcttcttatactcatttatcaatgactttaaaatatctattagttatgaatataaatttcatttgaatataatatctaaaattgttttaaataaacttgaaagatacctttaaatattattaattaacataaattggtatgcatgatatcgtaattaaatcatttataataattgatgttctaatttccaataaatatagatacttatagatgttgcttctaaatcattttatgaaaatattttatgtgtaaatgttgtgtattcttttgatttaactagtactttctagatagttgaaactattgaaatagcttcataatagttttggtaaatataatatcagttcattattgttattgttgttgttgcttcattatcattactgatttaatacatttaatcaaatacttcattgttgtataatggatttatcattccttattgttaaatattccgtaatctttaaactgcaaagctttttgtattagctaaataacattttattaataaattcaaatactgattgaatttgtattcactcattaactaaaatagcctttaatataaacattaaaacatttggataattaactttaaattttaaactaatacattagttgcatatcttgatagttttatgtattcattatcaattaatatacaatttgcaattgaaattaaaaattaattagaacatcatgttagattattatgataatacttgttttagtagtatcatactcattccaatgaataacaataataatatattagttcaaatcatatctggagaaacttatcatcactcatactagtaccttgtgtaatgtatattcaatagacagtcaatacttaataaaaaaccaatattcactaagaagaaaactctgttaattaatgcatgttggaaatatttactatgtgagggaagttctcttaataaatttgatggtttattaacaactttttctttatcaatatatctttaaatggtaacataatgcaatatgatgttgtttgtacactgcttgtttctaatcaataagatgaagaattaatttgtttcaaaaataaccaacaaaaatgaatgatttaccagttagatcatagtttatacgaacatctattttgaaaactacaacaattaatcaattaatcaattatagaaacgaacagtatttactaggaaagacacaatggatacacttttttgttttaataggaaacataaactatacttgataattcacttatcatcatttaagtaaaagactaatatcttatttgtgaacctccaaataactataaatgattcaatttactctttatgaatatcgtttattgttttttgttaaatgtttatactattaaacaacaccacatcaaaacgattcaaatttacagtatcaaaattacaataattgcaatcaaattatgaaatactactgttataatgactatttaaatattttgttgagtgtgttataatttcacatttttagaagaatatcatgttgtgtgtgaaactaataaatctgatctactacctaaataaaattcaataagttttattatcaaatcaattaaaaccatcaatatttattattcatattattaactgataatatattaattttatatgcagtacactttatgattttgaaacctgaataacagggataaccatgttcaattacaataatgcttcaataactgaattaaataatgcatcctatgaattttcgtaattaaattaaatgttcttgatgattcgccatcatatgacatatcactaattgcatcatacttttgaatttgttgaataattattaatttatgttcaggtgttgttcttttacaaactgattcataatatctaaacaatacaaaatgatgaatatttcattataagatataatttatcaaatcaatatccatcatttcacagattcattacatgatgtgcttaatatactgccttaaaataaattaaccaaagatttgcaaattcaatattaataaaaataaaatggttcagtaacttgtttttttactaatcttaatgttcaattgatggaaatcattcaaatcaactgtttcgaaattacatttgtttctattaacctctcaacaaattataaatctgttatagaatgacatactgtttctgcatttttacctttgcaaacagccaatgctaaataaactgaaaataatgggaattttaaaacgtcttttaacctttcatctatatcataatcaaacttgtcattcatccacctgtctaataaaaccactttagctgcatcttcgtaactggtacagagttgtgtaaaatgatatccaaaacatctattgcacatcatcctttgaacgtatatttcacattttaaaagtgttttaatggatgatgaatcatgaccatacgtatctttaaaatatttgaatggttcaccgtttattgaccttctttttttgtcaactaattctttccattcttctcctttacaaatttccacatctttaatatttttagaaaataataacttataaatcaaatttgtaactgtattgagcttttcataatttttcaatgctgttctcaaataaaaagaatcatcttcaaggtacagtttttccaatttccttgctcctgttacatttaaaatgaaaacagagtaaaaaactaataattaatcgattttttcttcttcatcatatgaaccatcaaggtgacgtgttaaatgagtttttagctcaccgaacgataatataaatagaggatcgtggtgaactctttttgctaaatgtctatacttttttggaaattttacttcatcaaaaccattatatatctcttctttaaatgtgggatgataggaacgtctaagctttcttaataacacaattccgtctttttttaataccgatttaggtggttcattcattgaaaggaaacttagttacatactgaaccaaaaagaagataataattttcattgtaaattatggaagataacaaattcaacgtttgtaatgtaaaatattacgtaaaacaaaagtacaagattatatacagaaagaatacactatttatacaagacagtgacacaagactttaacaatcacttgttaccaaacatacaatgatacaagtactgaaaagttagcattcaatacaagtctcatttggaatattcaaaagtgcaagaagaattgattaaatgagctcccctttttatagtctttcttccatttaaaacatctcaatcaatggttcagtaattatttgtttaagttttttaataaatctataatcaacaaaacggttacaacagttttcatgtctattgtaagtaatattataaaactttttgacttcttatgtatgacatataaaacttttattaaatattccttggagtttgataaaattcaaaatttgtataaaaaattcaatcttggtattatattcatatataagataacaatttgtatatagggtatttgaaaatcactaacataatattttgttgtaatcaatgcacgtttggtaggatcattttgaaatttatttatgacaaagttttattatcttcaaaaaataaaaaagaacaagctgaattaactaatgacttaaagttataatatagttcatgaagtttatctttattatcactgatgacaacagttttccctcttgaatgggaaaaaaatcaaattagtatatttgttatgtcatcttctataatactatcaccatcagtattcatatgcttaatctgtattctatttttataagtaaattcattaattatggacattatcttaatttcattatttaacctgaaaagtctgcgtaaactttgtgttgtgtctgtattcataatatgagacatcatcgaaaatctattaaaattgaattctttgaaggattctataatttttggattaaacttatcttttagaagagtattgggatttgtaacagattgataaaaacctataaacatcaaatttcttttcaattaaaaacatcgattgatcatttccctctatatcaccaacggtaaatccgtgtaatactaaaattgatttgaaattatcttttgaaacagtgtaagaaagtaaaattatattaattaatcatagctttaaaaaatgatatcaaaataatcatattagtatctaatgatgttgattgaatataatactcgtcaaccttatttgcaatagtttgaggtattttgatttctatttcactaaatgatgaatttgggaaaacagtttgttttatttccattgataaattaaaatatggaatattaattttatggtatgattgatcatatataattttagctaatcatgtaagttcaggtacataatgagcaaaaaaaggcaaagtataaccatttgcatctgtccagggagatattagataaacatttcaaatagttttgaagtagaaaatgttgaatcaattatgaaatactcatctccccttgcaacatgatcactgacagttttaataccatattcaactagtaaaggacatgcatgcactagtactctatcattgtacttggttaatttaaattttcaggaattttaggatcatatggattcatgaatactttgttggtcaaatccacagctatatcagtacttgtttgatgtacattcataactacagatcttataatagatcatgtcaagctttaaagaattgccattcattgatgatataccctctttaataacacatccattgaaaaatcaataaacagttgaacattaaaaaccttttggtttaattaattcgacatctttaacagcataatttctccttggttcagtttcaccaggtttagtatctaaagtatgtttgaaaaagagtaaagttcactaaatgttgtccatagaatgtattcatgtctattgaacatacatttcatgtcctttcatgttttaaagcatataaccgatgttgcgatgattatataatttgtatttaataagatatccgaaaaatgggtacttttttgaaaatgctttttactttcaggaaatggtataatttatcattaagatacacaatatagttataatataaaagtaattattttttttcatcatcaagaggataattagttggatcccatgcagtagtcatatattcgtcaagagtatcaagagttgcaatatcttcatcacttaattgaaatgaagtagcctctaaattaggaactaatcttgatggtgtaacagttttaggtaaaacaatataacctttacttaatgaccaattaagtaaaatttgtgctggagttttattatatttctttgataatgaaactaaatgttcatcattcatctttaaacccttaactaatggagaataagcttcaattttaatatcattttctttacaatattcagttatatcctttcttgctaaccatggatgaatttcaacttgattaacagctggtttaatagttaaatctgaataagataataattcctttaaatgtttaacaccataattagatacaccaatatttttaactaaacctgatttaacagcttcttgaagtgcaatccatgaaccatgtcttttttcataattagattgtggtgaatgcattaaaattaaatcaatataaccaatatcctttgctttttctaatgaaacattaattgcctttttagttaattcatatccatgattatcatcgaaaattttagttgtatagaaaacatcctctctcttattctttgatggatcttccttaatccatttagagataccttcacaaacttcatgttcattttgataatattgtgcactatcaatatgtctataaccggcctttaaagcttcaatggtaatattttctgtaacattaggaggagttaaatatacacctaaaccaacagctgggattttatttcctgagtttaatttgataatttcagagatcattttgcaagtttgttatttgagataagttacttagtataagtttattaaataattataaataataatactagacctgaaaagaaggaagaaacatgttattaatcatgtgaaaaaaaagtgactatacattccttttatattccaaatatttaagtaacataggggttataataatcaaagagaaactttttttgggaaaatcaatttctcatcagtgatgatttgtaatcacgggtttaataaacctttaaattctttaaatcctttgatcaaatttccaatttcaaatttccaattttcatgcaacatgaaggattttactgtcggtttatcaatagtatgtaacaagtcccgtaaccagactaatcaaccatttccgaaggttattaataagagcggagttactacgtatttttttttcatgaacacctgatattggatgagcaagaatttagcttgaatgtcgttatataaagaaatacactacataaccaatctatatcagaaaatggaggtaaaatgtacagaacttttcacttgaattgactaaatatgataatgccatgatgaaaaccgcaagttctgagaaattggaaatttgaaatttttcttatcagcctttatcgtttttcccaattgggaatatgcgataagatcggtggttattatttagaggtattggttggaatatctatttctatttgaagttattatatggatgataataagtataaaaggtcttgattatccagattattcgaatgtttttgttcattcttttcttttatttaattaaataacaaaacacaaaaacacacaaacacaaaataaattagaaaaatgcctgatattgtctttgatattgttggaacttgtatctcctatgaaaaagctattgatgctattacccttagacttggtgatagatttaaggaatctggtattgatccacgtttatttttcttcttttggcttgctggttgtgaacgtgattactcttatttatctcaatgtaaacattatcaaaaatttggtgatattttcaaatatactttctatagatcattattctttgctggtgttaaggaaccaagaacttatgctaatgatgatgatttagaatttatttatggtgaatggtttaaacttgaaggtagacctgaattaaaggaaatgtttaaacgtttaagagattatggtttcactatttggtgtttgactgatgcatctcatgatagagttgcaggttattttaaacgttcaggtgttgatatgcctgatgaaaatttaatttcatgtgattcaattggtgttggtaaacctgaagctaaagtttatgaatttattgcaaataaaattccttcatctggtaatgatgctttctttgcagcttctcatatgtgggattcaattgctgctaaacaaggtggttttattactgcttggtcaagtgttcatgagaaggaaccttgtactgaagtttttggctctcctgatattattgctactggtttagttgatatggcagataaaattattgctaagcataaagaattaaatgctgcttaattgtttaattgcttaattgtttaattatttttaatttatttaactaatattcatttatataactaaaaaaaaaaattatcttcatttattcaattattttcatttactgaaacgataatttatttattagaattgtcatctttttatttatattttatttatttgaaactagaaataatgattaaatttaaataaaatttataagtagaaaaaataatgttataaaataaatgttacttaaaagctataattttgattttggaatagttcctaacatctctaataaattgtttttagtattttccattctatctttagtaattttaaatgctgaaggaatatcaagtgaatcagaacttccattaattaatttagctaatgcctttgctgataataaaactcttggcataccatgaccatgaaatcctgcaattacaaacttattcttttcttctaacatttctccaacatatggaacagtatcatctgaataacctaaaattccactccaaacataatcagttgtagctttgaaatctttccaagtataaaacattttcttcatataatcatcaaaatattcctttgtaccttcaattaatgtactatcatcaacattattataaaatacttctttgaatgggaaaatatgttttttagcaccaccaacaataactgatccatcaggtctattgattaaataatctgtatctgcacctttatatctaataccataagtattagttaaatgtggagttctaatttttggatctgatgaaataatatgactacatgcacctttaattggaacaattttattttcaaattttggttcaattgctgctgtatatccattagttgcataaataactttttcagtaataactttacctcttgaagtttccactaaatatttaccattctctaatctatcaacttttaaaacaggtgtatttgtttgtaaatttaaacctttagaaacaacttttttcaaaagtgcagtcataagtttataaggccataattgacctgctgtataagttaaacaaactgatgagtcttcaactttagaaattaccttagctgcttctccaaatgtaatttgaacatcatccttacaagtaacataaggattttttatcatttcataataattttcaattgaacttttacctgattgggaacttaaatgaacatcacatgctctagttaaaacaaaatcacaatcaattttttccttttcaacaacttctttaacagcttttaaatgtgaatgttcaaaattaataatttcagcagcacctttttcaccatatttagatttaaaatatttatattgactatataaatcaggttttaaatgaccaccattacgtgcagttgcaccactacaaacgtttcttgcctctaacattaaaattgattttttagcagttttatcattctcatatagataataagctaatgttgaacctgcataaccagaacctataattataatatcagtttcttgtggtaattctcctttagtacgataagttgcaaattcatcttcagcggttagccaaaatgatttaattggattgttaactggtagttctgttttcattgttgattgaattgacttaaaaaatccaatcaagagggatattccataatatttggtcatatcaatcaactaataaattgtatttatgaatatatttcatgattgattataatttaaacagtaaccatttgtagaatatgcgacccatgatgtaatcagacctaattgagaatatccgctggaaaagtaactcatcaatggacatgataagctacagttttgataagataagaaatctactgataagaaaatttggaaatttccattttgggactattatctcagtgtcttatcaaactcaagagttccattgggaacctgtttcggaatatgcgattatcgacagtatttatcatggtttccaatatttatagatagttgatcgttttccgataacatacccctttatcgattaaagtttatgatccgacgatatttaaaaggtgatcagatactccattaagacgatattatcattctatttttttgaaagaaattaaaatctgatcatattttataaaacaaagaaaaacaattattaaatgttagataaagaagaaaatattattaaatcaaataattcaactagttcaaatgagaaacaacgcgttgatgttactgttgaatcattagaaaatggtgatgattttgaagaaagagaaattcgtgataaagcttataagattttaaaaggtcatattgatgaagcaattactcctgaagaaagtaaaagagttagaagaaaaattgattggagaattttacctttaattacattagtttatggtatgaattatgttgataaagcagcattatcatgggctgttatgtttaatttaagaaaagatattaatattgatggtaatcaatattcttgggtttctgcaattttctattttggttatttaggtgctgaatatcctgcaaattttattattcataaattttcagtttctaaaattatttgtgttgtttgtttagtttggggggttttacttttcggtcatttaggtgttaaaaattatgctggtttaatggttattagatttatacttggtgtttcagaagctccaatttcagctgcttgtattaattatattggtgaatggtatacaaaggatgaacaaccatttagatttttatgttttgcatcaggtcaaggtggtttatatattatattttcattagttgcatatggtttaggacatgttaatgatggttcattatattcatggcaatatattttccttgttttagcatgtttaagtattattttaggtacttatatgtggttctttttaccaacacttccaagtgaagcaaaatttttaacagaacatgaaagattaattgcaacaaagagagttgcaggtaatatgacaggtattaaaacaatttattgggataataaacaaattattgaagcaattaaagatcctaaaacttatttcttagttttatatatgtttttcagtatgattccaaatggtggtttaacaaattttaatacattagttctttcatcatttaattttagtaaatatgaaacaattttagttaatttaccatggtcattcttctctgctggtcaaatgtgggtttgggcatttttcggtatttattttaaaaatttaagaattttaggtttaacaattccaatgattattgcaatgattggtttagcaattgtttatggtacagaaaatggaaatgcagataaatggggtagagttttcgcatattggatgattaattcatgtagtgcatcattcccatatgcaatgaatatgacaggtcaattaattagtggtcatacaaagcaatcatttacaaatagtgcagttttaattgcatttgcagttggtaatattgttggtcctttctgttttaatgcaagtgatgcaccaaaatatactcatgcattagcaactattatgggttgttttgcagcatgtattgtaattggtgctggtttaggtatttatattttatgggaaaataaaagaagaaataaattatatggtaatcctgaagaagatgaatctttaaaacttgaaggtattattgaaggtttaaaagataaaactgatactgaaaatcatcatttcagatatgtttattagtttagtatgtaaattttttgtatttctttagctattaagattgattctattattaaattttgagactagtacttacagacaaaactaaataataaattataataagtaaaacaaagaattccaacttttaaaaacgtttctgtttgtattttgtaaactttaggttattttataatttatttaaataataaaaaattaaatcctttttcaaactctttaaattacaacattaagccatctaatcaaacaactattaagttctttaatgtaagaaaagttaagttttatgtaatctactgagaatagtgaacttacttttggaaaataaaaatattattgaaatagttaattattcaaaaaaaaagatgattgtaagtaaaaaaaaatattaatttaacttctttatttaaacaaatatataatatttttaccatataaatcataaataaggtgttttaacaggtatatttactaataaaaccttgtaaatcgtttaaaaaacaattggctcagatcacgtgactttttaaagaagcgggggaaaacagcaaagcgttctagaaagtgtaataggcaatttgtccgagtggttaaggagaaagattagaaatcttttgggctttgcccgcgcaggttcgaatcctgcagttgtcgattaaaacgtttattttttgtaaaatttttaagtctctttttcaacatgaatatttcaacatgaaatgatgaaaaattaatacatgtgctttataattgaaagttaatttagattaatctttttttttttcaactaagtagtatataatataggataaaccatttaaggaagaaaatataacaatgtcagttaatttatcatcattagaaccccaacaattaatggcatttaaacaaaatactaatcaagaattattacatttagaatcatcatatgaagcattaattttagcaacaaataaatataaagattgtattaaaagtgttaaagaaataaataatgattcaaaggataatgaaatgtttataccattaacatcatcattatatattaaaggtaataataaagttaataaatttaaaattgatattggtacaggatattttattgaaaaggatgaagatgaatcaattaaatttttcaataagagaattgaaaaattaaatggtgattcaattaaattaaatcaattaattaatgaaaaggcaaatttattaaatagtatagataatataattagagagaaagttattgcagcaaatgctaataaagcagcaaatactgaggcttagaatgagttattaattaggcaatatgtaaacattgattaagtttccaattatccaatcaagatataaatataaataaatacactgtataataataataataaacaaaaacaaaaacataatacagtttcggcgaaaacgccgggaagcagtggagtggtgtgcggcattttcaccgaagacaatctattttcaaagtcttttctcatagtaattttctgttggcactataatagtatacacacaatctcggttattttgccgggaatgttgcttacctccccacttcggtgaactcaattgaccaattggagctatgtattcctttccattccattctattctattcgaagataacacgttgccctttccgtaatgcatctagacttccccaacaattttcttttatatttgtctataaataccagtgtatattcccatattataacccattcttctctttttttattctttcttttaataacaaacaacaatgacatctttcacaccaaagattaaagttaatactgatagaaccacatatagtgaaacagaattaacaactaaatacacttatgaaaattcaattgtttcaattaataaggaaactaatgaatataatgttgaaaatattgaaactgatttaacatttaaagttgatttaaaagttcctaaagttggtgttttattagttggattaggtggtaataatggtacaacatttacagctgcaacaattgccaatagagaaaaaattaaatttcaaacacgtgaaggtgaaattgatgcaaattattttggatcagttacacaatcatcaacaattaaattaggtattgattctaagggtaaagatatttatgtaccatttaattctattttaccaatgattaatccaaatgatttcattatttcaggttgggatattaatgaaatgaatttatatgatgcaatgaatagatcaaaagttttagaatatgatttaagggaaaaattaaaaccttttatggaaaaaattaaaccaatgaaatctatttattatcctgattttattgcattaaatcaagatgatagggctaataattgttttaatagagaaggtggtaaaggtaaagttgaattaggtaataaatgggaacatgttgaaacaattagaaatgatatcaggaattttaaaattgaaaataatttagataaagtaattgttttatggacagcaaatactgaaagatatagtgaattaattgaaggtgttaatgatacaagtgaaaatttaattaaatcaattaaagaaggtcataatgaaatttcagcaagtactatatttgcagttgcatcaattttagaaaattcaccatatattaatggatcaccacaaaatacatttgtaccaggattaattgaaatggcaattgccaatgatattttcattggaggtgatgattttaagagtggacaaacaaaatttaaatcagttatggcacaatatttagttgatgcaggtattaaaattaaatcaattgcatcatataatcatttaggtaataatgatggatataatttatcatcaccaaggcaatttagaagtaaagaaatttccaaagcatcagttgttgatgatgttattgaaagtaatgaaattctttataaaaatgatgaatcaattgatcattgtattgtaattaaatatttagaagcagttggtgatagtaaagttgcaatggatgaatattatagtgaattaatgttaggtggacataatagaatttcaattcataatatttgtgaagattcattattagctacaccattaataattgatttaattattatgactgaatttttaactagaattagagttatgaaagatgataaatatgagaaaatgtatacaattttatcattattaagttattggttaaaagcaccattaacgagaccgggatatgaaccaattaatgcattaaataagcaaagaatggcaattgataattttttaagaattttaattggattaaaaccattagatgaattaagatttgaagagagattgtaattatataacttaagtattattttttaaaatgtttcaaaacattcaattattgttttcaaattttctaataaattattaactgtaactctaataaccctatcatcaattccattaacaattatatttaaaattgtattatttttaattttatattgtacattaacggtatcaggtttaagcattggatcaggtgataatgatttttgagcaattaaagcatgattgttgttaagaaatgggatattaatggataatgatacaggtaattgggacattgttgattgttttcagggaaaaagaatgtttatttcagttattaaaattattccaaactattcctaattgaaaattttcatgtcatcggagaagtcaatagccaatcccgagtcacgtgataaaataaaatttaaagcagacgcgacgatataaactgatattacgtaatcaaataataaaagactggaatcctctactatattaataataatctcttacagttacctaatcggggaaacagaaaataagcgccgaaatttgttaacagtgggcggagtttctaatcagtaccatggtgattatcaatttgtaatctttaattggccattccctctgattgggagtggtgaattgtataaatagtcttggatatcttattttgtagtcattttaattttaattataattataattatattctttaaaataacaaaacaaaacaagtactactatgtcaaatccaccagtctacacaacaaccaatggttgtccagtttcagatgctttctcaactcaaagaatttcaattgttaataatgattatactaataaagcaccaattggtcctttacttatgcaagactttaaattaattgattcacttgctcattttgatagagaaagaattcctgaaagagttgttcatgcaaaaggtgcaggtgcttatggttattttgaagtaactgatgatataactgatatctgtgatgctaaatttttaaatcaaattggtaaaaaaactaaaattttcactagattttcaactgttggtggtgaaaaaggttccgctgatactgctagagatccaagaggtttttcaactaaattttatactgaggaaggtaatttagatttagtttataataatactccaattttctttattagagatccaactaaattcccacattttattcatacacaaaagagaaatcctcaaactaatttaaaagatgctaatatgttttgggattatttaactaataatcctgaatctttacatcaagttatgtaccttttctcagagagaggtacacctgcaagtttaagaacaatgaatggttattctggtcatacttataaatggtataattccaaaggtgattggcattatgttcaagttcattttatttcaagacaaggtgttcataatttaaataatgaacaagcaggtaaattagcaggtgataatccagatcatcatacacaagatttatttgatgcaattgaaaagggtgattatccagtttgggattgttatattcaaacaatgacccttgaagaaagtaaaaagcaaccattttcagtatttgatttaactaaaatttggcctcatagtgatttcccattaagacattttggtagatttacactaaatgaaaatccaagcaattattttgcagaagttgaacaagctgcattttccccatctaatacaattccttcaatgcaaccatcaaatgatccagttttacaatcaagattattttcatatcctgatactcaaagacatagattaggtgggaatttccatcaaattccaattaattgtccattaaaatcaggttcatttgcaccacaaattagagatggtccaatgtcaattgatggtaatttaggttctacaccaaattatgcaaatgcatataattgtcctgttcaatatacagttcctgctaaggttaatcaagataaaggtaatgatgaaaaataccatgaagaagttgtaccattccattggacaattgatgaaagttacgattttgttcaaccaggtaaattttgggatgttttaggtaaaactaatggagaacaagaagcattagttcataatattgcaagtcatgcaaaggatgcagaaccttttattcaagaaagagttgctgaatattttagtaaggcaaatcctgttattggtaaattaattaaggaagaattaaagaaattaagtaaattataagttattttaattttattttattttattctattttatttatttatttatgctttttgttcattttctatctaattaatacatctaatgatcttatactaataattcatgcaatcaaattccttaccgccataccttcctaaaagagtaactcagaagacttagcggttccaccttccccattaggcaataacatacgataagcgatttaaattgataagcttagttatatccattattataaagctgaaatgattccctatctctctctttatctcttctcttcatctcattaaacaaacaccatggcttgtaaatgcactcaaagatcagaagagaataagaaattaacagcaagtagtagtagtagtactacttctactactactaagacaagttcatgtggtggtttaaaggaaagtgaaaagccaagtagatgttgttgtggtagtggatgcaaatgtcctggttgtaataccactaagttgtaatgtataatactttatgtactactctatactctatatcctctataatactaatactctatgataataccgacgcatagtctccaaagaccatacatccttacaccttgaagtctctcagcaaataaaatttcgttaatttccaatttctcatttttttgaggggaaataagatttatttattaaaattataggtttagatatagataaatacttcttattagacaacaatgttatcatctgtacgtagatttacatctaaatcatcatcaaaacttgcatatcgttcatttgcaacacttgattcatcaattccaaatagaattcatggtggtttacaagataaagatagaattttccaaaatttatatttaaaaaattccaaaaaacatggtactcaaccttgggatttgaaaactgctgaaaaaattggtgattggtataaaacaaaggaaattttattaaagggtgataaatggattattgatgaaattaaaaaatcaggtttaagaggtagaggtggtgcaggtttcccatcaggtttaaaatggtcatttatgaatcctccaaattgggagaaaaatgttggtccaagatatgttgcagttaatgcagatgaaggtgaacctggtacttgtaaagatagagaaattattaggaaagaacctcataaattaattgaaggttgtcttgttgcaggtagagcaatgaatgcaactgctgcttatatttatattagaggtgaattttataatgaaactgttattttacaaaatgcaattgatgaagcttataaatttggtaaattaggtaaaaatgcttgtggttcaggttatgattttgatgtttatattcatagaggtatgggtgcatatgtttgtggtgaagaaactgcattaattgaatcaatggaaggtaaagcaggtaaaccaagaatgaaacctccatttcctgcaggtgttggattatttggtagaccaacaacagttacaaatgttgaaactgttgcagttgctccaactattttaagaagaggtggtgattggtttaattcatttggtgcagaaagaaattcaggtacaaaattattttgtgtttcaggtcatgttaatgaaccatgtacatttgaagaagaaatgtcagtccctcttaaagatattttagaaaaacattgtggtggtgttaaaggtggttgggataatttattagcagttataccaggtggttcatcaacaccaattttaaatgctgaaacatgtcaagatcaaataatggattttgattcattaagaaatgttggatcaggtttaggtacagcagcagtaattgttatgaataaacaagctgatgttattagaggtatacaaagattattagcattttataaacatgaatcatgtggtcaatgtacaccatgtagggaaggttcaacatatttatcaaagatgatggatagattagcagttggtcaagcaaatgaaaaggaaattgatcaagcattagaattaacttataaagtttgtggtcattcaatttgtgcaatgggtgaagcatttagttggccatatcaaggtttagttaaaaattttaaacctttaatgattgaaagaattaatgaatataaattacaaaatggattagttaatggtggattaaataatggtggttggtatgaaaattcaagtattaaaaatggtattgttattgataatccaattccaaaggaagctttccatggtcattaaagatgtatgtccctctattctatttatttatttaaagtatactactactatataaaactatataattctccaagattcaataaaatatataagatacaattaagcttactgtcttaagactgtccacaataggaaacgtgtatgagctattaataaataaattatcccgcaatttattgaatttttcattttaaaatagaatataaggtaccttaccaacactgatgtctttattggtggatatagtatttcttttctttctttaggtcagtggacaatgaagtttggtaacctatctgcgtatttattacttgcatcaactgtattggcaatttatccaccaccggaagggatttcaaatgataataaagatttaatttcaattacttcaaatactattaataaaccaaatgaatcaattaataaagaaccacaatatacagatgaaacttcatcagagacactttcatcaccattttattccttctatttatcaatttcaatgattatagttagtgaaattggtgataaaactttccttattgctgcaattatggcaatgagacatcctcaaatgattgttttctcagctgcttcaagtgcattagttttaatgactgttctttcaggtttaatcggtcaattattaccacaaatattatcacctaaattaactagatcagctgcaagtattttatttttaattttcggtattaatttattaagagaaggtttgagtacttctaaagatcaaggtgttgaagatgaactggcagaagttgaagaagaaattgctaatgttgaattaaatgaaatttctaatgatttagagaaagctaatgaaaatattattaaacatacttggacatcaaggattaaaaatttaatttcatatatttcatcaccaatttggtttcaaacattttcaatgactttccttggtgaatggggggatagaagtcaagttacaacaattgcaatggcagcaggtgcaaattggttttcaattatattaggtggttcaattggtcatatattatgtactttattagcagtaatgggtggtcaatatatttcaacaaggattagtttaagaacaattttattaggtggttcatttgctttctttatattttctattttatatggttattctgcattatacgaatcttaaataggttattatattatatatatatatatcactacatacattattcaattaattcttttatacgttgttgtaggagttgatgaaacttttcattttttaatttattaataaatggatatttattattaatatattcatcatattcatttaatggagttgtagataccttctttttaatcttttttgatttaataactttattattaatactatcagcaattttattatatttaccaagtaaatcttttgttatatcagtcgtggtgggtttattaagatatttatctatattaaatgattttagtatagtatcattattatcattattatcattaaatattttcttaactaactcaacaggtgttatttgagtgtttgtattgggatcaaagttcctaaattgcattgtgtaaagaaaggaagtggcgtaaaaaaattgttattatattagataataactacttctttcttatttcttttaacaacgatatgaataaaataggtataagaacaggtattagaaacttccattcaagttatcaacttctatcagtcaatggaccaaaatttgatacacaaaaatttattgaagaatttgttaaatgtggtaaatttagtgaagatcaagctaaaagtgcatcaaatataatttctaatagtattaatgatggaattgaattatatgcatcaaatttaattagtagagaagtacttaataaaatgtcatataagcaaaaagttgattttgctaagttgaaaggtgaattacaattaattgataaaagtgattttaattcaattaagaatgagaatgaaagattaagaagtgaattagagaagatgagaattaaatttaaggaggagattaataaaagtttaagtagtgttagattagatttaagtttagagaaaggtagaataagagaggagagtagtatttatgatttaaagattaaagaaacagatacaagaatcaatcaagagatttataatttaaaagttcaaattgatagtgttaaaacaactgttttacaatggttatttggtgtttgtgcaggtacattttcccttgtattagcatatgcaagattagttagttagttatccttttatatacttaattataaattaaaaatttcctttaattgattaattgtatcttcaggagatgtaactgcatgaccaatagttctttcatcagtataaatttcataatcattaccacctttataagatttatcaccaaagaaatgaatattggtaaaattttcaccttctaaatgtcttaaacaataagttttatcccaaccagttgggaaaacatcgaaagaaatttgtccaccaattgaataagttaattctaaatcagagaaattttcctttaatgcattaaccatattaattctaatattatttggtaaatcgaatttttcatattcatttctctcctctgtattacaatttctaccaactggtgaaacattaatcataccttttctaaattcaataaaagtacctcttctgaaaggtaaatctaattcagataaatattttaagataaatttacttaattcattatatttttcttcaccaatccaattaataaaactttgtgaaggtaaaggtttaccaaatttaaatgcagtaagaccattttcagagaaacaataatcgaaattttctaaaacatcaggacctaattgttctaattgtttagcaaaatctgaaccaccaacgaaaccaacagcacatttttttcttaattctttcaacatatttttcatctctggagagatagttaatcttgcaggtgttaaagtaccatcaacatcgaaaagacagatggtttgaggttgttctctatcagcaaaggacatatttacgatacttataagacaatttcaaagaagaagtaccttatataaaagtaaataaacaaatcgtcgacaattgtccatttttataccaacgcgcttttaatttaaagtacataacgtgttataaagctttacctctactattactaacttctgtaatcaccgttgatggtaacatagtcatgacttagatcacatgtccagaactggcattgtccatcacccggtaaccctaaatctatatctatctgtaaatctggtaattctaatatttcactggctctagtttcatcaacaatttgaggttctccattaactaacaatttcaattctttactaccatcagttggtataaatgaaacattagtagtacttggattaacttcaatattactatatccaattgcacataagattctaccccaattagcatctttaccaaacattgcagttttaactaatgcactattggagatggaatttgctgccttttgtgcttctaaatcgtttttggcattcttgatgtttatggtaataaatttagttgcaccttcaccatctctgaccactaatttagctaattcaattgctaattcattataatttttttcaaataattcatataattctaaattaccattttcacttataatttcaccaccactttgaccatttgataatgataaaatagtatcattagttgacatatcaccatcaactgaaatacaattgaaagatttattaactgaattagttaataaattttgtaatgttgaatgttcaattggtgcatcagttataattaatcctaataaagttgccatattaggacaaatcatacctgcacctttaactaaacctgcaatattataagtaatattattatattggaaacttttggaaattaatttagggaaagtatctgttgtcataatacctttagcacaattaagccaatgttcatgattagaatccagttgggtaacaatttgatcaatacccgatttaattttgtccatttgtaatctttgtccaataacacctgttgacattgtaagtgtattcgagatggactcaacattattacctaattttttatcagtataattaataatttccctagcatcatttaatccaccattaccagtaactgcatttgcacaacctgaattaattataattgaattaaaattttgatttaatttagattgtaaattatctctatcaattataacgggagctgccttaaatttatttgtagtgaaaacaccagctgcattacaattatatgatgaataaattaatgataaatcgggattaccattttttttaacttgacaactaactgaaccaactttaaaacctttagggtaagtaccattagttgggatatattttaatttatcctttgggatggtcattgaatagagtctagtaagtctaagcattgttactaagaggagatagtactagaaatagaaaaaagtggaaaatgagtcaaaaagtggaaaatataatggaaaatactataataatagaaatagaccctataataattagccgcgattacccgtttgggaagccgtcgcgtctgcgggggttttccattttatttacttacttaacatgaatattatattataatagtagtagaataggtaatagacacttcttttagagacacccactatgactagaagcagtaggagactgaggaataatgacaggacagaggatatcactcctactagtgactcttttgttgaaccggagttatcaaatagtgtgattataacaggtcaaaaaatggaagatccaccttcaattaaaattaaaaaagaatttggtgttttaaataagaagaaagtgaataatagtaatgatattgtacaatgttttcaaaattatcagaagaaattacaggatcaacgggaaattgaaaaaaatactaaattaagtattctaagagatagtaaggatactaatactagtgatgaaagtgattcatcatcatcatcatcatcttcattatcttctgaatctgtaccaatacccacattatcattatcaccaaagaaaataataaagagaaagtatactaagaagactctcccctctacgacgttattagataaaataaataaatcaatgattgatattgaaccggataatatagaggagaatcttcctgtggaagataaccaaccaattaataatgattattgttcatgttgtggtatgacaggtatgtttatttgttgtgaatcatgcccaaaatcttatcattttcaatgtgttttacctccaattgattcaaataatttacctgattcatggtattgtaaagaatgtatcaaatcaaggaataaaaagaatataccttcaagtattggaatttatggtaaattatttgataatatattatttcaagatacaatttcatttcaattaccaagggaaataattgaaagtttccaagatttatcatctgataaattaggtgattataatgataattcttttaaaattgttaaatcttataaaacattaattaaagaaatggatgatccaataaatggtatatatgatttaaataatcaaccatatttttgttataaatgtggtgaaagtggtaataaagaaagagaaataattaattgtgattattgttcattatcttggcatttagattgtattgattatgaatttccaatgactaatgttaaaaaattaggttcaaaatggaaatgtccaaatcatgttgataatttgtcaacattaccattaagaaaatttaaaaatcaagaaattttaacagttaataatattaaaaattttgaaaaaattaatggtaaattaccaattaatgcaaatattgaaataattaatatagaggataaattaaagtctcttaaggataaattgaaattgctgaaaaatgataccaatttaaaatttagtaatattacattccaacttagtgaagaagaaattatacttgattttataaattttaataaaattaagaaaataaatgaaaatgataaatcatttcaattattgatgaatttaaatccaaatttaaaagattatattaaaagtttaagtaaattaagtggtaaaccaataatagacaaacaatatcaacaaattaatttccaaaaattattaaatatatcaaatgatgaaattaaagtaattgataataatctcccgcaagatgaattatctgaattattatcaattaaaagattattagaattaaagggtaaggataaattaattgaatttttaaaatcatagtataaacctatatagaccctatttatttactacccatttcaatatcagtatcgaaaaatgtatcccttaattcaatccatctagttgtatatgtacctaatataataactaaaactactgtaattaattctaaaatccaccaataaaaattccaagggaatccattaattaaagatatgataattaaatttaataaatgaattgttaatgcaaaatcccaaactaattttgatctacttataattaatgtaataatcaatactgaaataagtgaattaatcaaccataatagaatcaatgttaatccaaaactattctctaatgatatttcttcccatgaaaatattagttttaaagttgattcattccaaccaagtaatatggatgtaatgaagaatattataaatgctgtaaaatagtaaaatatttgtaatattaagatttgaaatgataatttagtactcaaattagaggtattacttggtgataatgaaatgtatctgttatgtagtgatgataatatagtcattatttatagttatgttcgatagcaatggtgttgttatatagtaagaaggtagtaattaattaataaaatgaatgtctttttaatgacgcgtgggaattcctctttataatcactttcttctttcttttggacaagctttaatacgtgtttagagtgggtattaaacggtattagaggtattaggagctggtatcagtgaaatagaatacaagtattagtagtataccttttagttagctgaaaatgtcccagaaacttaaatttaatgaagaaatcatttcaacggctgctgagccaatatcttctaaagatttactcctaagattatcaacattacaggaagaattatcaaacatggatcaatcatcaatagatttatcatctcttgaatctattaaagatgatcttataaataaaaaattgttgaaaaatactaatttaggtatacaaatcttagttagttgttgtttatcagatattttaagattatttgcaccaaatgcaccttataataatattaatttattaaatattttcaaattattcataaatcaatttgcttatttaacaaatgtggattcatcttattataataattatatttatttattggagagagtagcggaaattgaattgattgcattattaacagatttagataattgtgaaaaattattattacaattatttgaaactttctataatttatcaaacaatgtcagtaatgatcatttagaatctttaatggttgatatattaggtgaagttataagtgaagttaatcaattagatttgaaaattttaaaattaatacttaataaattcttagttaattctaaaaatttgaaaaatcaatcaaattttaaagtaccaggttttaatattagtttaaaattatgtgaattaaattcagataaaatgtcaagattaattacttattttttctcagaaatgatcttacaagcaacaaatgataatgataatgatattagtagtgatagtgacagtgatgatgaaaataagtcatcctcaaaaaggggtacaatagacatcatacaattaaagaaaatacataatttagcaatagaattatggagatacgttccagaagttttaacttcagtattaggtttattagataatgaattagaggcagaagatttaataattagatcaactgcaactaatacagtttccaatattttatctatttacccatcaagaattaatttctcatccacttacactgaaacttatatgaattggttgaaaaaacctttagatatatcatttgaaattagaatttgttggttaaatggaatttctaaaattttagaaaatagaaatgatttatcaaatgatttaattaatggaattttgaaaactttaatggattcaaatgaaaaagttagatatcaaacaattattgaattaagtaaattaaaacctgaaacttttttaaataatatattaaataattcattatcgaatgctttattaaaattattacgtgaaaaaaatccacttattagaaatgaaattatttatttcttatcaactttatataattatcaatcagaaaataatattattgataatgataatgattttattaagaaaattccaaataatatattagaattaatttttataaatgatttatcaattaatgcaactgttgatttagcattatttgaaaaattattaccattttcagataatcccaaagatcgtgttaataaattattaaaattaatttcaattttaaatcataaatcattatcatcattttgggcaataatgaaaagacaaactcaattatcatcagttttattaaaattattaacaatggttgaaaataataatgaagatgatatcaatgatcaaattaataatgcaattaattggttatctaaaagtttcccatcatcatatgaagctgaatcatgtttaaaatattttttcaatttaaaaaataagagattaattagattaatgattttatgttcaaataaatcaactgattatgatacaattgtaaatagtataagagaaattttaaatagaattaatgaaatgaaattaaataatgaatttaatccaggtgataataaattattaaataaaactaatatttataatacaattaaattattattattaagatcatcaaatattttttataatattgataatatttatgaaattattataatgaataataaaaaattaaatgatgagacatgcaaacttttattaaataatatatctgaaatttgtccaattgttttagaatcaaatattaaatcattaattaattcaattataaatttatctaaatcaattgattttgaagctaatagaattgataatgattgttatcatgatttaaaaattatttataattattatatttcaaatggtaatgatgaaataattaataataataatgataatgataatgataatgaatttcataattgtcttttcaaattttcaattaatggatcaccaaaggaatctaaatattcaattaaattattaaataaaacatcaaatgatattaaaactcctttatttactaaaattgtaaatattatttggccattaaatattgattcaatttattttaatacacatttatcaacattatcaacattatttcaatatgatatattatctgttgatacaattaaagaagatattagtaaatatttagctacatatgttctattaaagaatacaataaaggaggaagaagatgaaaaggatacaattacatggatcgatgataaagaattatattataataaacaaaatgtcaattgtttatctaaaatattaacaatgaaattattaactaattggcttgtttcaataaatgatgatttaacaattgatgttgaatcagttgccaaacctatattaagtatgttatcatcatatattaatagaggcggagaaattgtttctcaggatgatacaccagaaaattatcgttcaagattaagattacatgcaggttatcaaattttaaaattaagtaaatttacaatttttaattcaattattgatcaacgtagaattaatagattaattttattaattcaagattctaataataatgttagattaaattttattaataaaattaagaaaaaattaactcaacataaattaaataaaaaacttttaccattattatattttgttgcatttgaacctgatcgtttaattaaggaatcaacatcaatttggattagagcttcatataataaatatattaataaatcaagtactgctgattcattaatttttgaaaaatcatttattacattaattcatatgatattcaatcatcccgaatttaaagaattatttgttgaatataattctatagaagataacgataatgaaaatgaaattaccattaaggctgagaaatttgaagaacttgctaaatttggtttaacatatattatctatttcctttcacttatagttacatctgaaaatatttcagtattattttatttaactcaaagaattaaacaatataaaggtaaatgtcttatacctgaaaattccgaaaaatttgaagattcaatttatatattatccgaattaactgaaatttcaattaaatttataggtaaaattaagaattggagtattacagtttggccaggtaaaattaatctaccaattgaattatttgataatttagatgatttaattgctaataatataattaagaaaacatttattaatgaaaaatattttgaaattgttgatgaaataattaaatgtagatggaaaattgagaatggacaagttggtcaaaggaaagttagaaataaatcaaagagtacaattagtggagattctaaaacggttaagaggaaattagatgcacttgataaagaacttccattgaagaaaataagtcgaaataaagataataatgaagaatatgttactaaaactaaggaaaatgatgtgatacctacaagaaatagaagtacacgagcaaaacgtattaattataatgagaattaaattaattagattatatattatatacttacttacttacttattcatgatatctcatttgagttaaaactaaaactttaccaggtaatgttgtaacaggtgttggaactaataattttaatttctttgtagatgatgtaaaacctgaaacgtaacaaaatcctaaaactgaactcattgttacatgtttattaattattgaaagtttctccttttcatcaatatcatttgatgataataatttctttatatctaaatctttatcatcgataattgaaacaattacattcattaaatcagtttcctgtggatcatcaactatttgaaacatattattatatttccaatttctctctagttttttcttagaattatcattatcattcccagcaaatggatcataatcatcatcatcattatcatcatcatctgcatcaccattcataaaatccattaattccatatttgaactatctaattcttttggttttaaaaaaaggaaatcagttgtaaaacaatgtaatgtataaggatttaattgacatctattactaccataaaaatattgtttaattgatttttgttgtaattcacgttgatattttggttctttttcaatacaaccacttgaacgtggcattttaatcatatggaccttatcatttaatgttaattttttacgtaaatcaacaagtaaacgttcattaccaacaactaatataatattaattttaaaagaatttataatatgttgaattattttggcatttgatacattaaatgcaggtgtatctattattatattaccttttaaatttgaagtagataatttattatcaatttcaattgataattcatttattaaacatttatataattctaaattttctgtaaatgattctaatccataatttttaactaatggaatttgtgatctataaagacctgtaccaggacctgtactcattgtttcaccaaatgttgttgtttcaatatctaatgaatcatataattcacaagcagttaattgtgatggcattgtaaaatgtgataattgtggatttaaattaattaatataggtttagaatttgatgttttcaatgaatatgatgaaagtgtacgtgctaatgaagtcttacctgaatcttttggtccaattattaaaatacgtgaattagaattattattattatcactaatattattcttttcaattgataaatgtaggtttaagatttgctttaatatagtttcttctgatatatattctaaatctaatggacttgtagtcgtataagatattttacatccatgatatgttgaaattgcaaatttcattgattctttaaaagtataattaatatttgatgttaattcagtaccaaagatttcagctgtaccggattctaatttaatatttaatacaccagttctcgatgtttcaactctccattcatgaaaggcgggtatctctacctctgttctagctaatgcaaagtccattaatcaatagtaaaagaaagaaaagacgttaaacaaaagaaatgaaaagttatttacatgctacatgaaaaattagataatcaaattcaccaaatgtattcattcttcttcttataaagcaaaatgaccactaataccccatcagatacccccatcaacccattggctgccgttaaagcccaacgagaagcactgaagaacttctataaactaaaacaaactgaagatacatcaaataatacccccaatcctaccaatgacgacactaaatcaataacatcatcacataagaattcaattgatgatttaattgattcatttaaaattgaagatatagaagaatttattaatactgaatcttatattaatatacttaaaacagaggataaagtattagataaacttaattctgctaaaagtgatattaaatcaattatttataataattattatgaattaattaaaattaattcagtattggaaggtttaatattaccaaatgataatagtgtacatttagataatatttctaataatctgacaactatacgatctaatattaaaaatattgcatctattaatacagatatatttaatgatttaaataataaataactttttatatatcaagtaaataatcaacatttaattctttatctttcaatgtttcaaatacttcccttaatactttaacacatgataaataagtaatactattcctatcatattcagataatgcaacaattactgattttttcaatttatttaaatattcattaatccattcaattattcttaaattatttgaaatatatttcttattcttacctttcagactttgtttaataaatatttcattccattcattccaaattttattaataaaactcatataaactaatgataattcacgaatatatgatataatcattttacctgtgatatcaattgtatcgttattactattattcattaaatccgcagaattatcaatacttgatctaatatttaaagttcttaaactatcagatctacttattgttaaatttcttttaattgatggaattgttggagatgttggagaatctaattctgataataaattatcatcatcaagattattattattattaccaccacaatcacctccaactctaattgatccaatatattcttctaataatttacctcttgaatttaaaaaaatttcagatgattctttacctttatttaataataaacacatttcatttgcatttttaataatttcaatattatttgattcacatttaatttcatttaataatgaattaattaatttttcttcaatttttttaatattaattaatttaatattataaattaaatgaaattgtcgttgaaaaatatttgaattattatcatttaaagttttagaattaattaatgataatgataaaccaattgcaattccaatatctaataaatttttaatttcttcctttaatctatttaaatatccaatacattcatcatatctacataaacctaattcaagtgaacatgaagttaataaatcatcaattaatgtaattgatgaattaaattcaggttgaatttgtttttcaatattattatttgaacttgaaattctatgtgatgaatttggtcttgttaaattaatatgtgaaaaagaatttgaattatgatgatgatgatgatgatgacttggattattactcaaattattattacttcttctctttaaatttaaaatttcagatctagcttgattaattgcatttataacatttaaatattcaattgaagtatcagtttgaaataaaaaaatttgatttgaatctttttgtttaatacataatgtagttgataaatttgaatttaaacttgaacttaaattagaacttgaattagaattattatttaaattatccatagattgattaaaatttttcatatctgatacattttgtacaattatatcatcaatcatccaagaataagttgcaacatttctaatattagaattattttttttagaattaatctcttttatacgtgaagcaataagtattgaatcattcataataactaaatgaactggacgtacaggtttaaaagtaattgaatttaattccccccaacgacgtgattctataagtatatgtctcattggtattggaggtaataaatcatgagcacgatcaatatttaaataaagttttttcattgaattagtccatttattttgtaacattgcaattgattgtctattagttttaaatccagtagtactattattattattattactttccataaattcattagcttcattaatttgttgtgataaaacatcagttaaatcattaattttaggttttaatgaattaagaatttcattagtatttttaaaagcattactaactgcaagtacttgattaattgattcacttaatgaaaatttaatttcattatcattattttcatttaatttatctaaataatttataaatgaatcaattttatttgcatcagcatcaaataattgtctttgaacaaatgttgatgcattgaagttttcccttgataattcataaagtatattattactatcatcattagtagtttccttaattgtaatattactctcatttaaattagttaatgaagaatttaatatttgattatgtgcattaaatggtaaaggtggagcatccattccaattggaggttgtgataatttaattgaaaatcttctccttgtattacttgttgcattagttgcattagttgcaccagtttcaacagatctaattgattcacctccaattgttaattgactattattattataattattattataatattgattaacattaaatgtattattaccattattcatatgatcatttgatccattctgattaataaaagcagccctagagaaccgtctattgatatctgtcatagttatccctagaataaacaacaatcatctacaagataaaccttcaagacatgtataatgatcataatcgctatattaaattacttaaatattacataatactctcatatatcactaactaaaccctgttaaccatttatcattcattatatcttgcattgttggtctattatgaacatctgtaactaatattctccttattagacttatacaatcatcacttatatcactatattgtgggaaatttattttaccatctaatatttcatcaacactgcaaaatggattctccttaaatattaaagtatataaaagtacacccattgcccaaacatcctgtgatttaccttcatatggttgaccatttaatacttcaggagctgcataatctattgtaccaacgaaaactccaaatggtccatccttaacccatgcagcagatccaaaatcaattaatttaacaaaataatctttatcaacaattatattttcatctttaatatctctatgaacaattccattaatatgcatatgatttaatgctgcaacaatttggaaataaatatattttgcctcatattcaatcatatctctcttaatttcaattatatcatataaatcaactgctccattatttttaccatgttgcattgtctctaaataataacattgatcatcttcaaagaaatcaattattctcattatattagcatgtgggaatttatttaatgcatataaaatttgaatttcacttggaactgtacctaatgatttatcacgtacccaagtatcaactaatattctctctttgaaaattgccttaacacaatctctatataatggatctttcttatattgtgcaaatacaactttaccatatgctccttgacctaaatttttcaatatttcaaaatctgtaaactttttacttcttttctccttaccaattactttggggaaattaattgaattttgttttaaatattctaattctttattctccctatctaaatgttcttgacaggtaactggtgatctcagacaaaatgaatcagttctattaatcttaggtggttccattggttccattggttcctgttccttctcttcttctttttcctttgaaatcgatgataatgataatgataatgaagaattcattttaaccaatgaattagatctatttattttaggtgttgttggtgatgaaatatttgattgattaattgttttaatactacttgatctacttaaattacttgatgatgaaccttgtgaacttgtatctaaattatttccatctctattttcaaataattttaattgtgatggtaatgaactattacttaatgattcatcattaaaatgatgaatatctaatttatcctcaaatcttatacttggtttcggccccacatttccaacattctcactattattaggttcactgactttaatttcaggtacaactttattatctactaatttttcaatatgataaactttattagagaatgaacgacaaaatgtaatccaaagtaaaaaataattattatttgatatatgtaattgaatatcaacattaattaaattaccatcaatatgtttaccattaataccttttgaattaatgaaaatttcttctctttccttatcatttttaccaattttccaagaatttaattttctaaaataatgttcaggtaaaactaatccatcttgatttaataaatttggattttcaattaatgctaaatttaataaatttgtaaaatctggtaaaattaaatcaattgattgatttttcaattctgatgtaccaaataaattttttgcaattgcttcattaaaacttttaattgtataatcttttgatgaaattaagaatgaacctgcaatatatggtaatgaatgtaaattaactctaatataagatttagtaatttcatcatcaatatttaaatattcacttgtaattgcacatggtacaaaattattatttaaatttttcaatgtaaaatatcttaaattattaattaaatttgaatctttagaacttgttatatcattattatttaatgatgaatctttataattattttttaaaatattagataatgaaggtaaaaatgttgataatttaaaatttttcaaatttttttcataaagtgaattattttgtttaattaaatcagaaacataaaattcattttttaattcattatctcttttaattataatatcaattgtttcacatgcaacttgttcaaaaattaatataataaattcatttttcctctttgcccataatgaagtccaagctaatccattatatcttttaactgcaattatttcacctgacataatcaatgatttatttctataaagtctatcaaatactaaatctcttgatcttggagcaattaaatccattaatttcattttacataatgatgatttacttaaaccaaacattaataaacctaaatcattagcattaagtaaatcccagggggaatttaatgaaactgtgaaaactgcttttggagatttagttttagcatttgaagttgcatgatattgtcttgtatttaaattggaagtattatttaatgatgagaggcctaatgttgaagttgttgtattagttagtccagggatattattattattattataattattttgttctatgaaaggagttgctaaagcatgtaaaattttaatttttaaaaggttaattctatcatttgaagatgatgaaatattagataatgataaattatgtaaatttaatactttttcctctatatcatcaatattattttgatcataatcttttaaaagtttaagtatatccattaattcagttattgttgaatcatttaaattagaattagagtcagaggaagattcagataatggagatgatgaaatgctattaggttctttcatattaatagtattatatagtaaagtttgtaaagttgaacttgaaatatttttatctaattttaaaagattattatgaatattattattgttggtattaaaattagaattaaaattatgattttgattttgatttaaatgaatattataatcagggaatgattcaattgaactattaagccaatctggattttcaagtaagatttctaaagatcttttcaaaacatttaatctcatagttaatgaatttatagaaacgggtgtataagaataagattgtgaagattctgttgtaaattgtattaaattgttcatattattgttcatattattatccattattaatggagtatctaaactttcacaagaatttgaattatcatccattaaataaaatttactattattattactctttgaatcaatttgattattcattaatgaatggaaagcattttgtcgtattgaatttgaagaattatctgatttaagagatttactcttagataaacttctcgaaggaggtgtatacggcatgtaaaatggatatatcaatagaagtttaaaagaaagatgtattgaataaagggttgattatacagtacatagtaaaaatttaaaattattaagtgaggtcttttataagagtatacattatatacattataaactattagataagattctttgcaagtaacagttctgcaataaggacacctgaacctgctgctccaataatagtattatgacttagaataaccattttataatcaaagattggatcaggtctaattctaccaacactaacaccataacctgaatctctatttctatctaatcttggttgtggtctatctaattgttccaagacatgaattgcatgttcaggtgctgaatgacaattaagtaatttagcttcacagatataatcccttaaacaagtcttgacttcatctaatgaaggtgcaggttgatttttaaatttgaatgaaacacattctgtatgaccatctgaaactgcaactctattacattgagctgaaacttttaattcatcatcaagaataaattgagttgaatcattgtttagtgaacctaaaattttctttgcttcccattcaattttatcttcttcaccagagatataaggtacaatattatctaaaacgtcaatacctgaaacacctggtgagaaacctgcacctgaaattgcttgtaatgtagttgttgaaacaaattgtaatggaccaaatttatcaactaatggttttaatggtgcaactaaacctgcagttgaacaattagagatacaaatttggtaacctttagtatctggattattctttaatctattttcaatcatttgtaaatgttcagaattagcaattggaacaattaatggaacattttcatctcttctataattttttgcattagaaataacaactaatccattattaacaaaagatttttcaacatcacctgcaacatcagcatctaaacctgaaaatacaacatcacaatctttaaaagaatcatatgtacattcactaacaattaaatcttcaacatttgaaggcattaaatcagtttgtttccaagtacatgcatcaatatactttttaccagctgatcttttacttgcaccaattgcatgtaatttaaattgtggatggttagccaatagtaagataaaacgttgaccaacagaacctgtggcacctaaaactcccgctttcttatatgtagtcattacactataggatacagaaagaaaagaagaagaagaagaagaagaagaagtaaaagaaagaagaagaacataagaaataccaaatgactcaccaccatttaaaccatttccttatataatctctctttctataagtaacaggtcttgtaggtcttgtaggtctttctataggtgagtacaacactgtatctgtgtctgtaactatactatcatcatcaacatcataccataccaccctctctaatctatctctttcactatcccccaatacacttataccattacttactaaactatctaaatcaatttcatcactacgtattgtatctaatactatcttatcccttactgtattatattcattacattctaccaactcataaaactcctcttcacccatcatctccttagccttctttaatatcccatctaatccatcatcaatatcgtctttaataaacacttcctttccatggattgagtcagactttattgatatttcactaattgggaatgtaattgttgtatttgaactagttgtaactcctgataagtactgtatactatgattactacttattctactattggctagtttattattaaatgattttaatcctatgttgttattttcatcaataccattactactactatttagaataatcccattaactaacacaggtgtaatacacttatcactacatacactactacttatattaccattactatacctacttaccaacatcatactacaagcaatgaatctgctaaaagaaacaacagtatctaataagggataaattttctcactttaaccaatcataccttcttttaaccaatgatcttacatcttttccataggagaatactatacattatagtatctattatactattactcctactgcttaataacatatcacctgataataaattatcacaggaaattcaacatgatttgcaagtattaaaggatacaagtaataatttactaattgatgaaaataataaagatgatgatgatgatgataatatcatacaagacataatacaaccatgtacaattactaatccattaactaatcaattctatgatttaagagaattatcatcattattggataatgaaattcaagcttggaatagtaaaggtttcgattatggacataatttttcaattggtatttgttcaactccaattaaaaaccttaataatttaacaccattagattttattgattcatcaaataaatcaaatattgcaggttattatactaacgaacaaggtaataaagtttcaattggttcaatttcatcaaatttaaaatttagaggtatgaatttagtacttgaatatacaaatggtgataaatgtgatggcactgaatatactaaaaacaccctccttacatttaaatgtgatagagaaatgatgagtaaggcaagagttaattatttaggttcaatgaataattgttcttatttctttgaagttagaactgttcatgcatgtgcaacttcaaatgaaaaggatgaaactgcaatttgggggattttcctattgatttcactttctgcattagcagtttacctatttgcaggatttatctacaagattattcaatcacattatgaaaattcaattaaaaaagataaaaagggtggattaattgtataaacagtctttttatattatatttattgtatagtacagcatattttttttctttatttagtaaaactctttccttttgtaccatgaccaaacgaaagagatcacaatcaactacctccaacaaaaaacgtaaagttgatgattcatataatagtgatgatcttaatactattttcaataataaatcacaatttcaaggtatgatgaaaaaatattggttacaaagacataaacttttcactaaatatgatgaaggtatattattaaccaaagaattatggtttagtgttacaccggagaatatatccaagtatattgccaaatatataggtaaacaattcaacaataagtttacaatactggatacattctgtggtggtggtggtaatattgtacaatttttaaaccttaattgtaatgtaattggagttgatattaatccaattcatttaaaatgtacagagaataattcaattgtttatcatggtgaaaacatcaagggaagattgaaattattaaaaattgattggaattgtattaatgaaggtacatctgttaatcaactcaaggatatgaaaattgattgtgtatttggatcaccaccatggggtggacctgaatatattaaaacaaaagtctatgatttagaaacaatgcttttaccatgtggacttagtaaacatttacaatttatgaaacaattctcccccaacatttgtctattcttaccaaagaatagtaatttaaatcaaattaaattagcaacaagtttaaataattataaaaaagttcaagtaatttatttaaataataaagataatagaataaagggtattttatgttgttggaaaggtaatatgtaatatgtaatcttttatatcactcttgtaataaattattaacaatttcacttaatggaccaaaatctgattcatttaataattgaaattctttaccaattaaagctgcatgttttaatgatgttgctaaatgaatttgaatccccaatgcagttaatgcatcaccatgatgacaaaataaatgtgcatgaattctaattaatcttcttaaaattgttctacataatgcaataaattgctttggaaatggtacacccatctttgttgggaaaattgattcatcatctaaaaatgtttgaacccaattcattaaagtttcaacatatgcaggtgcacttaatggtattggaggttgaccatttctatgtaatggatcttgccatctatattcatattctgatgttgcaatcattcttggacaagttgttggggaacaaaaatttgtaattgatccataaagcatattagtatgattataaatatcaacaattgcaactgctaaccattcattaatatcctctcctggtggtaatttaattgctttagctaatgcacctgtacctaatgaactttcagcatgagctcttaattcactatgagatgatggtgtattggtatttactgtaccattattttcaagtgttggtctaaacctcctacgtgatgtctgatatgatggtacctcaggtaatgtaaatgacatttggtctgttctaagaagaaagatgtattgataaataacataacaaacatgaaagtatttacctttaacctttttaggaagagcgtttggtataaatagagagatcggacattacttttccatataatcctcctttactactctttccttttggtaaatgtcattaattaaacctaatatcgaagataaaacagattctatagttccagaagtggaagtaaagaagtacagagagttattatcacttgaatcccctatctatgattttgaaatcgtacctggatttttcaaacaatcatcattagacactgatgatacaacttatgattcattaaatgatcatttaggtttaaataaaccttcatgggaaaatctcctattggaacttcaaacacttaactctaattctcctgcagatactaaatataaattaattttctgtgcaagacatggtcaaggatatcataattatacattatcaatagttggtagaccattatgggattcattttattctcatcaatatggtaatgttaaattacctaacggtgaaattgtcaattatggtcctgatccattccttaccccattgggtgaatcacaggctaaatttattaatgaaacattaataaaagaaattaataatggtatgccattacctactaaattatttagttcaccatttacaagaagttgtcaaacattgtactattcaatgaataatatacttatgtttaaaaatagtgataaaggtcttaaacctttaattatggaaaatttaagagaaactattggtgaacatacatgtgatgaaagatcaagtaagaaagttatagaggaaagacttaatggttgggggtttacatttgaagatggatttacagaaaatgatgaattgtatagatctgattggagagaaagtgttggagaattaactattagaagtaatagattcttacaaaatgtatttgatgataaatataatgatgatttagttgtttattcatcttcacattcaggtcaagtaaaatcaatcttattggctgttggtcatagaccttatattatcccaactgcaggtttaattccaattgttgtaaaggcagttaaaagaaagtaaagattgtatacattgttatttattatttattatttataaactatttatttttgttagattttcatttgcaaaataacgtacatcatcatcttcatcattatttaataaattttctaatattggtataatttcattatttgttatatttaattgattattttctttaaaatgatttgcaaatttaaacattgatttagcaacattaaatctaatatttggtacattatcattaattaaatctttaataaatggataaatataattttctaccaattcattattaacaatatcaattaatttaacaaatgtaaataaacatgtaattctacaaataaaattattaaattcttgagtttcctttttttgtaaaattttatcaataacttgatttttactccattcattaccaaataatttacataaaattgataaattttcaacagctgcatttctaattgaataaactggatcccaaagccaatccatacaaagttgtcctaatgatttatcgaaaaatgatatacctaattgttgtgctaataatgggatttgttcaataattgctaatctaactctccataatttatcatttgataatgaagtaattgcaggcattaaactttcatttaataattcaataccaattacattattaacaatttctaaattagaaattatatttaatctaacatcactaaattcatccttaagcatttcaatgaaaattggtaaaaggaaatcaattgttctttccttacctaaaattggagataaattactaatctttgaagctaatgcagctctaacattttctgattcatcattacttaattgattaattattggtaagatttgttcaattaataatgaagggttaattaaattaattttagatgaaaattcaggtaattgtttagaaattgcctttctaacttctgattcattatcctttaggagtgaaataaaatgtggtaataattttaatgtaaaagaatcattattaaaattatctgataataaattaaatttatctgcaatcatatatctaactctccaacttggatctgatattattgaaattaatgaatcgaaaagttcattaattgaatctgtagttgaggtggtatcttcagtggcatttaatttattataataagataagatttcaataaggacatcaattgataaaaatttaacagaatcttgattatcattgattaaagatttatacatttgcaaaaataaattccaaacttgttcattaattggttcattaagtgatgaaataattttaggtaaatttgatgcagcagcttttctaaccattggagaatcatcagtaattaaatcataatataattgaactaattgaattttcaattgaaattcatcttcaattgaatcatttaatcttggtaaaacagtataaaataaaccagttgcagctatatgaagtgaaaaccatctttctttagataatcttataattaaaggtataaaattttccttaatttgatcaattgataattgtaatgatatattatttaatgaatcaactgcattatctctaacaattggttcctcacaagctgaaattttctctaaaagtggtaataataaattagcaaattgaacaccaccaataaagggtataaaatcttttaatttagaggcagcaattgcaataacttcatcttcatcctcagggattacatcttcaaggaaaggtaataattcttcccttgtacgaattggaccaagagcaattgcaattgtatctaatctattcattgattgaactctagatgcgacatcatcgtgtctaagttcatccataagtaatgctataggatataaatctgttgacatagtagttattattctatacactattatacactataccttgtataatctccttagagaagagagcagtgaacgtagaaggaggttctttggaaagcagctgagcattaaaattgccaccacaagggcaattcgcgtatttttatagaggttatttggatgagcctgcgtcgatgggacgatgtctgtttctttatgtgtagtctctatactgtgtatactgtgtatactactggtatcactctctgtactctctgtactctccattatatcactaactgcagtggcagtacccggtaatctagctctcaatgccttgttcattgtcatacactctcctaaaagaaagaaagagatagtagtaggattattatagtgaggaaattaaaatttattaataactttacaagggcaaatactctatatctttatactacactccttcttttagtagacaatatgagtagaagatatgatagtagaacaactatattctctcctgaggggagattatatcaagtggaatacgccctagaggcaattgctcatgcaggtacaactttagctatactttcacctaaggaaggtatagttttattagctgaacgtaaaattatttcaaaattattagaatcatcttcaaatagtgaaaaaatttataaaattaatgatcaaacaattgtttcagttgcaggtttaacagctgatgcagaaattttaattgatcgtatgagaaatgattgtcaacaatatttaaaaatttataataaattaccaaatacaatgcaagttgtaaataaagtttgtgattttaaacaaggttatacccaatttggtggtttacgtcctttcggtgtttcatttttatttgctggttatgattcattaaatggtttccaattatattcttcaaatccttctggtaattattctggttggttagcaacttcaattggtgaaaattcttcaagtgttcaaacattgttaaagcaagaattaaatgctaattcaacagaatctcataatgatatcacacttgatgatgctttaaagatagctttaaaagtcttatcaaagacatccgataatactcacctctctgcagataaacttgaacttgcatcattatctctacagagtaataccaacaaaccaactatcaagctctacacccctaaagagattgataaccttctcaatctccatgatttgtcaaagaaagaagaagagtaagtctttaatagtatattatatagaatagattacgtaagtttaacatttttcaaattttggaagttttacctttattatagtgggactgtaagtatttctactatttgccactacattcttccttatacaacgatgtcccgtttagctaatataatctctaaattagcattaccagtatctgctgctattctcattgccgatgtttccctctatgatgttaaaggtggtgaaagagcagttattttcgatagatttcaaggtattaaacaatcagtagttggtgaaggtatgaattttgcaattccttggttacagagaccaattattttcgatgttaaaactagaccaagaacaattacaacaactacaggttctaaagatttacaaaatgtttcaattactcttagagttttacatagacctgatgtattgaaattacctcaaatttatcaaaatttaggtttagattatgatgaaagagttttaccttcaattggtaatgaagtacttaaatcaattgttgcacaattcgatgcagctgaattaattaatatgagagaaattgtctcaaatcgtattcgtaatgaattagaattaagagcaaatcaatttaatattaaattagaggatgtttcaatcactcatatggcattcggtattgaatttactaaagctgttgaacgtaaacaagttgctcaacaagaagctgaaagagctaaatttttagttgataaagcagatcaagaacgtaaagctgcagttattagagctgaaggtgaagctgaagctgctgatcatatctcaaaagcattatctaaagctggtgatggtttattacttattagaagattagaagcttcaaaggaaattgcttcaactttggcaaattctccaaatgttgcttatttaccaagtaatgcaggttctccagattcttcatcttcaagttcaaattctttattattaaacatccgttaggatatttatttatttatctcttcacttactcttatttctgtatatacaactataactcttatataaccaataaaatgaaaaatgatgacattacatcatgactataaataatttatcaaatgcacaaagtattttttaccatttcattatatacttaattcttcttcctttattaacaatgcctgcatctaataacattgcatgtcttaattgtcgtgagaagaaacttaaatgtgataaatctcaacctaaatgtaatcgttgtaatttaaaagatatcccatgtgtttatttacaacataaaaagactggcccaaagaagaaatcacaattgaatattcaatctcaatcaacaataacatcattaagaaatgatataaatcatatacttaacactaacagtacatcatcatcatcaataacaacaactaatactacagatattccaccatttcttgcaaatttaaacttaacaatgaatgatgttgatagatttcataatttttattttaattcaaatacacgtatatttacatattcatcaataagatatcgaaatacatttgctaaagatcctcattcaattctccattattcttatatgatttggacacttagtgcattttatttagatgaatatcaacatttagttgataaattatatgaaactgctttattacaattaaatacttattgggaatgtattagagattcatttcatgctgatatattaacttatttacatgcattatgtttaaaatcacaatttgaatttctatcaggtagagaaatgagagctgcattaactgtttcttcatcaattagattaactcaaatgtttggttatgatcaaattgatttatcacctacaactttgggttcaccagctattttctttagaaattttactttatcttcaggattagaggcaactaataatttacttgaagatgattatttggatccagaaatccctttggctgaagagagaagaagagttttatgggaagtttatgcaattgataaatggtcttcattagttactggtttaccatgtgcactttcattggatagtttatctgttattttcactaaattaccttcaccaactacatttttagataatcccaaagattcaccacatgataataataataaagaaaaaataccaaatcaaaacgattctaatgaaaaaaaaattgataataattcatcatcatcagaattattaaataataatcattcaggtgaagcatatttttctaaaaatgatttaaatataaataattctaataatgaaacaagttatttccttcatgatgcaatgaggaaacttgatgataatcaagttttaattgatatgaattcttcaagttctaaaattttattacttacaatttcagaaaatattattaaatggtgtaaaatgtttttaaatatggttgaattgaaaactttaaaatcaaattcaagtattaattcaattagatcaaaagttgatgaattaaagaaaaattttcaaagtatgcatagtaatttaattttctttgatatgacaactgaaccactgatgaatattgttgttacaaatacaacaactcttctttatcaaactgttttaattaaatttagttcattatttgatattcaattaaaggaagataaatcaggttcaaatataaatcctaatgcaattcacctatttaatgatattttacatgaagtttcttttaaaagtgaaaaattaattgttaaatttattaataaatcaaattttgaacaacatttgaaaaaagcaccagttttcatagttttcattaatagtattaaatcattatttcaatgtattgcatttattaaaagatttaatttctttttaaatttcaataataatgaaaaaatttcacttttaaatactttatcaacactttcaaatattttcaattcattacctcaaaaatctccaattgttgaaaaaactaaaacaattattaataatggtaatgaattgttaaatcatgctcctcaatcattatccttctttgattctttcttcgattccgctaaaacttattaactttaatgtctgtatatgtttttctgtatttttatataaatttgttaacgtttaatgattatgattataaaatgtatttatcttattttacatccaattatctaacatattggctacaggtgcttttttagcaatagtggtttttttaggttcagttggtttggtgaagtcgtctaacatacttttaggttgaactgtattttgaggttggaaatcatcaagcatacttttcggtttaggtgtaggaacagcctgaaaatcatccaacagacttctacgttgagatgtcttaggttggaaatcatccaaaatactctttggttgaaattcatctaacatacttggtactttggaacttttagaaccattacttgaaccattcataaatttagcaagtatatcaccaggtttctttctaacttccttaacttcttcaatttcctttactttaacatccttaactaaatcaacttcagaaaatttccagtttttaattaaatataaacctaaccaatcacaacccattttaaaatacattgttgaagatttcataacaaatgaaaattcatatttacaatccatttccttaataccttcataatataaaacatttcttttccttaatgaattgtataaaataagtaaaactggatcctcagtaaaatttgttcttataacattagataaatcaggacattggaaatttggtaataatttaattaaatcatccttaattaatgtaagtggtttaattaatgcttgagcagattttgatttatttttcaaaatccagaaaacccaacttaatttccatctatcattattaatgattgcatcttttaaaatacctctctctaaaatacttttcattgaatcaccataatcacaatcttcataacatctagaaactgcaattgctaatggtaaatcattcatttgtctcataataacattaactgcatccttaggtgaatctgcaagaaggaaaaatgttgccgcatcattatatctatgtttaccaagtaaaacatatgcattcttaagtgcagcagatttccatctcttttctttaaaatcattacttaaaaatttaaccattttttccctctctctatgaccaatagaattcttccataatcctaataaaactttctttttatgtaatgctaaataaaatattgaacaaactgatggatctttattaccattatttaaatcttgaaatttaataaattcattagctgcaataatttccatagtttgctgtaattttttattatctaaccataatggtaataaataacgttttgcattaacccaatcaattttagaattagattgttcattaacaatatcaaataaaatatctctattatcggaatgtaacgcaaataaaatatcacgaaatctaatagtttcaatagcattaactgctgattccttggtttgattaactttgaaaagtttcatacctaaataaaattttagtccattgaaatctaatacattaaaatatttcaatagaatatccttcataatagagacagtatgtgttaatgttatctgttgatgtccagttaaaaatggtaatcttatctttgtcagtttttctattagtatatcagcacattctaaagaaaacttctcatcttcattatcatcatcatctgtactattatcccccagcataatttcttccttactaatacctaaatcaaaatcatcttcccttctttgtcctaaatcaatttctcttaaaacttttgataatttagtcaatattttattaattaaattacgtctttcaccaaataataattgaattataaattgtggatgatataatggaagtggtccatttaatgcagatgataaatgtaataaatcattactcataatttccaaactaccaactactttcttagttattggatcattcttaaaatcaagttttttatcacttaaatataattgattacctgtaccaattactaacaatccattactcatccatatggaatcaccaatttgatgtgttgtttcatctgaaatgtcaattttcttaattttagtaaatgatggaattttattggtataatcataacgtaattgtgtaaataataatgagtgtgatttaaatccaactgctaaaataccttgtccgtaggtagttgatgtccaatctaaatctttaacaatttcattttcaaaaatttcagaataatccattatacctaatttcatatcccaaatacttaatttttgtttactttcatcaattattgccattttattaattgatgatccagaaatgaatgagcaattggagatacctgttttaaatgaatcctttaaatgccatttaattgttgaatgattatttaaatcattgttatcatcatctgtaaatgttacgtaataaatagaaacacgaccagtggatgaaacagttgcaagtacatcacgtccaatattatcaatattcttcccccagccaacaggatctattggtgaaataatatgtaaatcttccttatccagtattctcaaatcatcaatcatacattcagttagtgaacaagtaatattaccaaattcacaatgtaaaaaatgtcctttaactgtagaattattatcaaggaccttgatatcaaactcaaatgatttacatacaccagttttgtaaattaagatcaaatggcaatttaatttgtttgattcaggtaatataaataaacattcaggtggtgtgtcggtattgatttctattttgcgaacttcttcagatacaagattatgttgattgctagtggatgtatggaaagcaattaaataattatcaacgattgtgaaaacaaaatgtcccctattccaaataactgcatcaatgactggagttttagttataattgtggactttttagttaatgttgttttatcatctgataggtaaataggtatccaaagataattttctgtaaatctagtaagtgataaaattgatgaaccatcacttgatctaatcagtttcctgactgatttattatgacctgtaaatttttgattcaaacaaccaatctttctagttattgttttaagtatttttttatttgattggtgagtggatttttcaaaattaaagatttcattaaatgtaaatccaatttctctaattgtattatgaaataagtcatgaattactaatgataatgctaaatttggagaataatgatcaatttgaattgatttcagtaagaaattttcaggaattgaaggtaagcaatatttaccaagaaataaattaactttatagaattcattattatgaaataatttatcaattttatatgtaatcatcttagatgggacaactgaacataaatttgtgaatccatataaatcaatttctccatcacttccaataaccatgcataattcagatttagattttataaattccatcatctttgtctgtttacgcattgaatgattcaattcggtataatcatgttcattctctaaatctgataacatttttccaagaccaagttctaaatatgggttatctataaatgttattgatttagttataccttttgatttcttaaatgtgtcgttttcaaataaatctaatgaacctgaatagaaaatatcaaatcctgtatctagtctataagttgaatatactttaagccttgaatcagcggtgacaatgtataaaacgttatgttgatgttcgcttttaatatttgaatgaattgaattgttttcagttaataatcttacatcatttttaattatactattggaaggtttcaatataaaactatttgaaggggtaatttgaacagaactaatcgatgacgagttattagggtcagattcattcatttgacttttccaaataagatcagtaacataagtttcctgtgataaataatgtaattcaaaatcacaatattcattagtaaatccaactctatgccataatttaacatttttatcataataccctatactagcaatacaagttgaatttggtgatattttcactttataaatgggattgggctgaggtttataccacatcaatgaacatttcattattttattatctggagtgtttggatctgcaacatatgacatttggtgcatttttagagaattattcgaacctgttataagttcacatgatgtttttgaattaaattctgatggtaaatcaaatatttgagcatcatctgaatctgaatctgcaacttgtgtataatctgaccaacatagacaatttataatatcattatcattatggttatcgttggtaattttatgttccaatgaccattgaatcttcaattcacttaaatctttacgaccatggaaattgaaattataataattagaaacttctggtgaataaatatgaacttcatcctttattgcaatagcaatcttaccattgacacgattaacatcaacggcaaatgaatctgatggtagatatagtgtttgtaaatgtaatgaatttttagttaaaataaccaaattattaccagaagtgtaagtcaagatctggattgtattccaattgacaaaacagcatgagtctggggtattattgggctgtcctggcaagaaattcaaagtcattgacttatgatatggtgtattaattggttattcagtagataaatgacatttcatcatatattaagatatcctgatataggtaacaccataatgaaaattctcaatgacatggaagtaattttatcttaactattgggtacacactcttctcttctatttccttctctagagacagcaaatagatggttgcaagttgtaaggaccagcttaaacaagtggcaatatgtttacaaagatctccatgtgtgatgattgaaagaaatactcctaaagagtgtattaataaccccgaattaagtaaagacttaccagatctctgtaaggcacaactagcaacatttcttgaatgtaagagaggtattgttgatatgaggaaacgtataagaggtaatggtactttgagtacgggtaagtttgatgaacaatataagaagttatcagatggtgattttgatccaagggaagaaatgaagaaattaaagacattagattctaataggaaacaataaataacgaaagtatctaagaatcgtttatataactgtatatagtattaaataacattattacaaattatttgcaagttctacaatatgattgacaagtttatctacaagatcactggtgatatttggtgaattaaagacacatctaaagaattctccattatcttcacctgttatactatcattaggatttggtgcataatcaataagaaattcaccacttttatgtaatgcaattgctattttcctagttaatgcagtattttcattacctgacagtttaacatcaggtttaggattataatagaaacaaacttgtaaacaaggtattgggaaattgtttacaagtttaaaacctttgatattattcaatttagagacaaaataattggcaatttcatatgaatgattgattctcttttcaaaaccttcattaccatagtatagccatgaaagatacattttcaaagaatcagctctacgaccacatcccattgtaccattagccagatcaaaattttcatcatcatcaattgaattatggaaaaggtatggagcatttaatgaatttgattgtgtaaagattctctcatctggtaaaagtaaaaatgaacaagtagttggaactcctaacattttatgaggactaacagtgattgaatcagctaattgacatccttctaatcttttcttatgaatatcactgaagataacattaccaccccatgaaccatcaatatgaaaccaaatattatatttggaacaaattttcgatatttcagtaaatggatcaaatgatccaaaaacggttgtaccagcagttgcattaatatataatggtgtataaccatcttcaatagttgacaatattctcttttctaaaaattccattgacatttcaccattttcattaactggaattttgaaaactgaatttgctccaaatcctaataagatagcagatttttcaatactataatgactatgagcactggtataaatagcaaatttatgattaccattaccttcaatttttgtctttggatatttaatacttctagcaatttgcatactagtaatatttgaccatgaaccaccactgaatgttaaaccacctgcatatttaccgttaaatccaaacattgaggcatatttttgtgaaactttcctttcaatagcacttaatgcaggtgaaacagtgaaaacatgtgagtttgtgttcaaaacggagagtaataagtcagataatacaccaataggatttgtaccaacatataacttatccatgaaacccggatgccaagtagaaattgagttgtttaatactttttggaaaacttgcaatatctccactgatgggtcttctgaaccggtttgaacggattgttcaaaaagtgaccctaagttgtttaactcgaagatattgtataaatctttaggattttcaaatctaggaccaatatctcttttaccattatctatatctttgacatagttgataatcagatcaactgctggtttgagtaattgttcaagttcttgcactctattcttctccaaactacactcgattgtcattatctagtattctactctgatctactatccttatctatacccttccactgatcttcttataaagaaatgaagttcaaattccgtttctatttgaagccacagtgaaaaatttcaaattttttcgtttttttcctctttgggacattttctattatcttaaggtcttcttctaatcttcaggtgattagatactatagactgtaaaaaggacaattaaatgagttcttcaagtggtaatgacagtggggacaatcttgcaggactagatataaaaatagtagaccaatctcatttagagagagaggttgcaattgatgcagataagacaattctatcaaaagaattacaaattgaagagaaaagacttgcaaaggcaaatgaaaaatatacaaagtatagtaatgctcttgctcaattgaagaggaaattggatagtgggaatttgaaaatttcagagaaaactagattatctgttcaaattgaagaattagaggaaaatgaattaattacatcgttaaacgacttacacgaaattaaggctagaataaaagacattaaattgaaaatggagtccaatatcgaaaaagatggtagtaattttgatacatctactactgataatggacctgttcaattacctgatgaaactagagatgaatatcttataaggacaggtaaaattaccgcattcggtacagcaaattcattcataactgaaaatgatatcaataataacaataatgaagatgtagtggaaatgccatcacataaaaatcttaagatgccaggtataaacactgataataatgaactgaataacgatgaagattcggatattgaaataacacattcaaaaaccctaactaatgattcaaattccgatgattttaaaattgattatgatgaaattaattcagattacgatgatgacgaagatgattacatttatgatgatatagatgatgcaatcagtactaaatcaaagaaaaaaacatccaagaaaataacttcaaaaacatcatcatctcaaatagatgatggtaatgagagatattatcaacaaagactatctaaatgggttaatgaacgatccacgttaaggaaaaaacataactccgaatatattgataatccattagttgatgaatggtacaaacctcatccaaccgttaaagatgcagtattgcataaaaaatttaaattacctggtgatatattcccaagtttatttgattatcagaaaacttgtgttcaatggttatctgaattacacagtcaaagtactggtggtatcattggtgatgaaatgggattgggtaaaactgttcaaatgatatcgttcttagctggcttacattatagtaaagaattaagtggaccgatattgattgtttgtcctgccactgttttaaagcaatggtgtgatgaatttcatcgttggtggcctcctttcagagctgttatcttacattcaattggtgaaggtatgaatgataaaaagaaaactaaaggtaaaagtaaaaagagaggtattgatgatgacgacgatttttctgattttgaagaagaatatagtgaaaaatcaaataataatgtaaaaacattaacgaaaacaaaggataataaaaaagtaagagatttagttaataatatagttaaaaatggacatgttataattacaacttatgcaggtgttagaatttatgcacaatatttattaccaattaattgggggtatgtagtcctcgatgaaggtcataaaattagaaatcctgatagttttattacaattacttgtaaacaattgaaaacaccaaatagaattatcttatcaggtacaccaattcaaaataatttaattgaattatggagtttatttgattttatataccctggaaggttaggtacacttccaatttttcaaagacaattttgtattccaattaatttaggtggatatgctaatgcgactaacgttcaagttcaagcaggttataaatgtgcagttattttaaaagatttagttacaccatatttgttaagaagacttaaatctgacgttgctagagatttgcccaagaaaacagaaatggtattgttttgtaaattaactacagaacaaagaacattataccaaaaatttattgattcgaatgatttaaagaaaattttatccggtaaaagaaatgcattatttgggattgatatacttagaaaaatttgtaatcatccaaatttagttgatttaagcatcaagggtaaaaaaattacaactttacctaaattggaggaattaacttcaaaatctggtaaacttcaagtagttattgcattattagaattatggacaactgagaagaggaaaattttaatattcacacaaactaagcaaatgttaaatattttagaacaaatgttacaaattattaatcaagatagtattaaatataattatatgagaatggatggttcaacaccaattattcgtagacaagaattagttgatgaatttaataatgatcctaaatttaatgtattcttattaactactaaagttggaggtttaggtgttaatttaacaggagcatcaagagttattatatttgatcctgattggaatccatcaacggatatgcaagccagagaaagagcatggagattaggtcaaaagcaagatgtttcaatttatagattaattatggcaggttcaattgaggagaaaatatatcatagacaaattttcaaacaatttttaactaacaaaattttaaaagatccaaaacagaaaagattttttaaaatgactgatatcaatgatttatttactttaggtgatgatgatgttgaaggtactgaaactgccgatctatttaatactgaagaatctaaatttaatggtattaaaaagaggaaaactaaatttaaatcaagatttgataataatattaatactattaatcaatctggtaaattaggggaatctgataaagacttcattaatgcaactaaaaaagcgggtgttgaaagattagaaaaatttgatgatgcaaatgttaaagaaaaatcaatgtttgatgatgatgatagtagagttaaaaacaatgaaaataataatgaaaataattctaatttaatgtttgatattttaaaaaaatcaggtattcattcagctgttcaacatgatgatataattaataaaaccaacattcatgatccaaaaaaaaatcaaagtcaaattgaaattgaaaatgaagcaactaaaattgctaatgaagctattcttgcattaagaaaatcaagagagttaacaagtaaatcaaaagtttatgttccaacatggacaggtaaacatggttccgctggtaaattaatagttcaacaaaacaaattaaataacataactaggaataaaaatactagtataagtagatcagcttcacctattgtttcgtcatcaaattctatcttaaacagtattaaaaaacggaaaactgatgcattaaggaaacctgtgactaattcagaatcattggttacacaattaagtaattatatggctggtgttgaaggtaatttcagtaaatcagcagatgttttggaaaatcttgatatagatttcagtgatactaaaactgttgatgttgttagaaacatgttgaaaggtatctgtacctgggataaggaacgtaaaggttgggtattaaaacctgagtttagataaatgtatttatagtattcgtatgatattaaatgtaataatttgtttttttagagatatttttatttaataggtaaacgttttaaacgttaaatttgaaaaaaaggaaatagatataagaggacaccgaaataaaataaaatatgataaaataaaataaaataaagaaacaaaaacatagataaaaaggaataacgaatgatggtattatttcaaataattgtactaacctatttagtacctaatttataatcacctgcaagccatctgtttaacattgctaatgaagcttcaggttgatcatatggaaccatatgaccaccatcaaacattctagcaaatgtgaaataatcaaagtttttaacttgaccaatttgagttttaccatcatcagagaacattttttcagtcttagcattactgaaatcttccttacctgaccattctaatgcattagtccaagctttattacctaaccaattacaaataaaatctttatcacctgcataaattaaaacaggtaattctttttctaaaagatcaataacattcttatgataaggtttcatccaatcacctgcaaataagaaatttctattaacatcaaaattacatgattcgtaagtatcaacttcagcacctaatttctccttaacaacatcttgatttaaatatttatcaatatattctaaacctttataacataatgaagaaccttcacacatttttctaacatcataaacatttctaccagttttttgataaggaccaatttgaccattattacaataaattgaagcaggaacacaagagaaaacagattgtgattcataacatgattcaataaatgataaacatcttggtaaatttgctaacataccttcacattctgcttcatctaaaactggtttataacctgattcttcaccattacatgccataacttcatattctggatattgagttaatggatcagttaaaccattaccaattaatacagaagttaaattaaatgatctatcagcatgagataagatttcagatgcgaaaactggaacataatgaccaccataagattctgcagcaatatggaaatctaaaccattatattctgggaattgttggaagaataattcaaggaatgcataaacatctttacctgctgcaacagtatcagaaactgaaccggatgaatatgaataaccaacattaacaggttgatctaagaaaataactgaagcatttgaattccaagaatatggattataaactggatttaagttttcatcaattgcagatgaacctaattcaaagaataaaccagttaatgaagaacaacctggaccaccatttaaccaaaggacaacagggtcattttttggatcatttctactttcgaaaaaccaataaaagaaatgtttatcctcagattcaacatctaaataacctgaatattgtttagtatgatcaatacctaattcaccaggattagtttttttaactctcattttataatctgggaatttatcagtatttgcaacatggaagtcccaaaaattatcaggtttcttagaaattttaaattgaggttcagatgaaaattgtaaattttgaacagtatttgggaatttaagttccatttctgaccaagcttcaataattgaattatctaattcttcaattttttgacctgtaactaaagctgctttctctaagacagattttgcctttttaatagaatctggcaatttatcattaattttatcaccaattttatcgaatgcaccatcaaggtttaaaggattttgtaattgttgtttaaaatttgcatcaggtgaaattaaacctgcattgactgatgtcaatgatgcacaaagtgagattgctaaagttgaagtcaatctcattgtaagtgtagtttttctttattaaattgtaattttaattgtagttgtaactatagatgtaattgtatcaattgtagtcaacagatggtcccaaagcactcaaacagccactacttgaccaaaagaaaggaagaaggaaggtataaataaccaatacaattaaaaaaaggccagccaccgcagctgagcattaattatttgccctcataaaatttaaaatttaaaatttattaaatttaagaaaaccctcactgccttaattttgacacattctcttatcttatcttatctaatctaatctaatctatagactacacacctacattacacttggattaccacaaaggggacattccctctcattttgatcaacaaaccatgatcggaaacatccaaaatgacctccatgtccacatcccattaatgttacaatattacccttaataggttctccacaatatgaacatccagattgttgcttatgacatctatcacaataccaaaatccaaattgactaccttcttttaacatcaatctatccttacttgattcatttattaatggtttcttgcaatgacaacagagggttttcactgatgtctttgtttgtccaatggttttgaaactttcatatgtttccgatgcaattcttaaaacagtggctgcattgttaaaatatccacttcttaataataattcatggtattcatatatccattcctcagcagtctctgctggaatagcatttgggtatttagtagcaaataataatgctaaggatgcacatgtaattatatcccctctttcattactatattgacatgctttctcaatcatatcactaggattccatggaacatattcatgaactttcttctgtaatttagtcttactgtcattacctactgacttctgatctttaacactttgactcttatgtgatccggcctcctctttattattggaattattctctttcataatacttgtaagttgactcttagtatctgatgttttacttaatctagtgtctaaactctgactaacatgaaatgatggatcatcatttgcattacttgtaagtgacattattattctacttctagtctttttcatcaatggtgaactagataatgataatggagatcccgatttttcatcatcaaaatcaactgaagatccagtaaatgagtacctatatggtctaatattattacttgctaatctgtttctaaatttattatcaatatcaattggaacagaaactggttcatttttattctttgaatcttcagaatgtttaagtacatcatctgctaaaatttgatttttcgtgtgggaaatatcactttgtgtactattattcgtagcaaccagatcagttaaattatttgtattttcagcattgtcttttgtagttaaatcattatcttctgtacctccttcatcatcttcaacggcattctcatttatgaaactattagatttatcaaatgatttatcgtcataagatttattagaaacttcactacctaaattattaataacatcactctctgatccataagatgtacctaaattactttcactatgactaaaagaatttttcctatcaaatgcaaaatttaacaatttattttcaatttcttcctcttctttaacttcattatctaaaataattgacattttaatacttctccaagtttgacaatctctgaaaaatccaacaaatgcggcaatcattgcattatattcacaaatttcaactatactatttacatcatcaatattattatccttaattatataattacttgaaaggagcttaaatttttcaatattattattgggtaatggtaaatgaattggtgtaatccatgatggtggtggtccataattatgtgataatattctaacttgtgatggttgtcttgattgcataattgtgggtctatgaaatttaaatgatgaagaaattgttggtgaaaatgcattatgtgttgaatttgacatttcataaagttgcattccatgatcaggtggtgtaattgatgaagtattattattattatgtattaacattggatgtgatttataatgattattattagtaaaataattttcatcatctccattatttttgtaaatattatcatcactattactattgctatgaatattattattaaaatttattttaatatcttcattctctctattttctagttctttcccctcataatacgtttcgagatcattataactattacttctactttcaccttcaatttcctcttctttaacaacattatcatttctactatttttattaaatggaccttgaaattgaaacttatcctgtttaataactgttaaatcattaacttgtattggattccaacataatgaaccatttttaatattatttataaattctttttcctttaaaacatcatattgtattaatgatttatctttagaacatgtaattaaatgttttggagttctccataaaatttgagttatttgagctgaatgaccatttaatactgattttggtataaattttctatttaaattccaaatttcaacacttgaattattattaaagaatgaaattgcaatatcagtattcaaaattgaattattacctctacctttacaccattttgccttaaaaattggatctgatgtataaattgtatgacaaggttcctttgaatcattactatttgaatctaaattccaaacttgtaattgtttatctctaccacctgtaattacataatctaattcaggatgccaatcaattgttaaagcaggacctgaatgtgcattaattcttttctcccaagttgaatttttccttaaatcccatttttcaattacgccagaatcgaaaactgatgaaattatattaccctttttattattaaatttacaacatctaacagcttcagccataccattaagtgacatttgaggttttgaattacttgttcttaaatcccaaattaatattttaccatcttgagatcccgataaaagtaaataaggtgaaattctattaaaatcaattgaattaacagctcttttatgaccaatcaatgaagttttaattctattacctctatcaaaatgataaatattaattgagccagtaattgtacttgaagctaaatatctaccatattgttgatgaccaaatgataaatcacttatagtacctatttttgccttaccactttgtttcataactaattcagtttctaaacttatatcagtattagaaacttttaataattgtaaattacgtggagttgcaattgcaattaaattaggagtttcccatgatttatcacatgctaaaatttcatttgatgattggaaatatgatctttcagtttcattaaaacttggttcattttgtaatgatggtagtaaagaatgtgaaaatttattttgattgggtatttctatattggttgatgatgatactgaggaatctatattcgtactattatattcatgattattattattattattattattattattattattattattattattattattattattactactattattactcataccaccattaagaaaagaattattataaagataagacattcctcttgacattgtaccactaggtcgtctccctgtttctgccaaatagatcggtgacccagtagatggtgaagtattatgagcaattgtagttttagatggagaacttgacattaatcttgatataaaatcatttgaacttgatgaattattgttaatgctagacatgtgtttgggtacactactattatttgaaaaattgatatttttagaattcagtgacccattaaaattaccactactcatctataacagtgtactatactaaactgtctctacttcctttatcattcccaagattaaactgttatcaataatcccacaataaaattcatgcagtggtgaaataaggtaaatttaaaagtgaaaataaaaaaaaactattacgtaatcccgacgcgtctacttattttcataaaaattttaaaattttcccactttacgcgtcagtgggttatttgatcaagtctttattcatttcgagttttaatagaaggtatacaaagagtatatatacacacagaacactaagtaatgacagtagaggtaaagaatatgaatatggaaaataatggggaaataacgaatcaaataccgaaggaagaaactactaataatacaattaaaatatacaaaccatcagaaagtgatatgcgtcattattatgataatttcctaccatttaatttaattttccaatggttaaatcattcacctattccaaatacagattttacacatagagaatttgcatttgaacatcaaaatggtgcttatcaacgttataattcatttcaagattctaatgaatttaagaaaaaagttgtaacaattaatccaacaagatttgaaattggtgcaatttatccaattgaacctaaaaatcgtaaaagtgtttctaaaaatttaatgaaaccaattagtaaagaattaataattgatattgatttaacagattatgatgaaattagaacttgttgtaaaggtacatctatttgtaataaatgttggaaatttatttcaattgcaattaaaattattgatattgcaattattgaagattttggaattaataatagaatttgggtttttagtggtagaagaggtgttcattgttggattagtgattcaaatataagatatttaaaggaacaaaatagaagatcatttattgaatatttagatatacttaatattaaaaataataaaaataagaaaggtattttcggtatgaaaaaaccttatcatccacatgttgaaagatcattagatattttaaaaaatgaatttgttgaaataattttaaaggaacaaggtacatgggataatattgatgcaaataaagatttaattatgacaatacctgattcgagattacgtaacgcattaataaataaatggaataatgaaccaaatttgaaaagtactgataaatggattgatattggagaaatttataaaaatttgaaaattaattcatttgatataattgattggaggaaagaaatgattttaacaatgttatatccaagattagatattgaagtttctaaacaaatgaatcatttattaaaatcaccattttgtgttcatccaggtacaggtaatgtttgtgttacatttgatcctaagttaaaagaatttaatccatttactgatgcaccaaatttaaataaaattttcacagaggatgaatttgattggaagaatacaagtttgaaagagagtattgaaattttcagtaaatatgttaataatttaattcaacaagagggacgtgagaaacgagaaaaacgtgaagctggtgatgttgatgttgatcagtcattagagttttgaatccttatcagtatactataattacctaaaagagtaattctcactcttatctcatgaaaaaatcaaaaatcaaaaaaaatttcaaaatattagaaattttcaatttctcacttattgtggcttgagtgtattaaatgtggctttcctctctatataaactataaactataaactataactttcttatcttgattaggtatatttgcaacagtttctatattcaattaacattgtctcaatttccttatttggtaaccgtttatcttatccaattaaatgtttttaacttaaattgttatgttatattcccagtattctataaaactggtagtatatcctgatttagtagaatatattatgtatgcttattttaccttcttcttttttttaacttaactcaccaaacaaaatgacaacattaggtagtattaattacgatgaagcaattcatttccacaatgatagtgatagtaaaactgagacaggtattttaactgtctctaaggaagatttagctaaaactgaattccctgaatgggcaccaacttgggatattaaacatgatcacgcttttgaaaatattgaaccttttaaacatattgatagaggaaattttgcagatccaacatttgaatcattgaaaattaatgatgatgttaaatttaagagagttacaccaaatttaggtttagaaattgatggattacaattaagtgaattaacagataaacaaaaggatgatttagcattattagtttctaaacatggtgtaattgcatttagaaatcaagattttaaacatcaatcatttgataaaattaaagaatgggggaaatattttggtccattacatattcatccaacttctggtgctccattaaatcatcctgaatttcatttagtttatagaagaggtagtgaaaatgaacaaaaaaaattttttaaggataaattacataatattgcttggcattctgatgttacttatgaaaatcaaccacctggattaacattatttgcaatgttacaaaatagtgaaagtggtggtgatacacaatttataaatatgtttgaagcttatgatagattatcaccatttatgaaagaaaaaatcgatgatttaaaagttttacatacatccaaagatcaagcatattttgcaaaattaactggtggtattgaaagaaaagatccaagtgataatattcatccattagttagatatcatccagttttaaagaggaaatgtttatatattaataaatcattttcaagaagaattttaggtttaaaaactgaagagagtgataatttattattatttttacttaatcatattgaatcatgtttagatgcacatgttagaatgacatgggatagtaatacagttgttgtttgggataatagaactgttattcatacatcaacaactgattgggattcatcagatattagacatgcatttagagttacaactattggtgaaagaccaattggtagtcaaaaagaatatgataattggacacctgaattagaaaaggaaaatattaaaaaaactaattattatacaaatctttcaccagctgaatattatgatgaagttattgctaatgagaattgatttctcatgtataggatgttaatcgctttactcttttttaacattttttttgtattttacccatatctttgttttgtatttatttaatgatttattgaattccctaagtttatgcttatttttagtactagttttaatcggtgggagataagagtttttactattacacattctagattgaaaggtgattacatagagttagatactacttcctactcctaatacacccctgtaccatattaactctagaatattttcttacaagataataacaactcaaactatgatatcacaaagccaccatcatcaccaccaccacagtttcccaaccttcaggaaccacagatgaagaagatgctgccacaataaaatttaccaaattttgacagaaaattcgctatttttttcaaattttttcaaattttttttcctttttcggagttttaccattttgctatctggttgtaacggatcattatcatctcttgataatgaatattgttctagttcactacactttccattttgtcaagtgataagtttggaaagtttttttcatcttaaatagacttgaaaagtacttcatttttctgaaatttgaaatgcctaacttattccgttttaatttttgtcttttaattaataacaaaagcaaagaaaataaaaatgtcaacacacgaatctgacatctctcatgataatgattcttcattaaaacttgaagatgaaaatattcatcattattctgactcaaaatctattagtgatgatgatttaacaattgatgaatcaaatgaatcaccagattctgcaaataatcctttccttaatccagttgttaaggaaaaatatttagcaatttatgaagatgcaaaatatgaatgtcgttttagatttgatgaaacttttagatggacaaagaaacaacaaagaaaattaacttataaattagattttcatgttactttattagcttgtttccttttcactgcattacaaatggatagaagtaatttagctcaagcagtttcagataatttattaaaagatttaaaattaacaactaatgattataatacaggtaatacaattttttatgtttgtttcttagctgctgaattaccttcacaattaatttctaaaaaattaggttccgatatttggattccaattcaagtttgttgctggtcaattataactttatgtcaatttaaattagatggtaaacaaagtttttatgcttgtagagcattattaggtatctttgaaggtggtttcattgcagatatggttctttggttatcatatttttatacagcatctgaattatcaattagattatcatttttttggactgcaatgtatgttacacaaattgttaattatttaattgcttatggtatcttacatatgggcggtgtacatggtaaaccaggttgggcatggttattcctaattgaaggtttaattacattatttattggattttgtggatttttatttatggttccatcaccagttcaaacaaagaaaagatggaatccgaaaggttggtttactgaagaagaagaaaaaattattgttaataaagttttgagaaatgatccatcaaagggtgatatgcataatagacaaggtttaaatttaaaaatgatttatcaagcaatttcagattggcatttatggccaatgtatttaattggtattgttgcatatataccagaaagtacaattacagcatatatgacattattattaagacaaatgggatttagtactttccatacaaatttactttgtattccatataatgttttaaaaattataatgttattatcaacaacttatattagtgaacatgtttcaagtattttccttgtttgtttaattcaaccattatggggggttgtttgtcttggagttttaagattttggaaaggtagtttagttaatcattggggtacatatgttgttttaacaatttgcttaggatatccatatattcatgcaatgatggttagtgcatgttcaagaaatagtcaaagtattaaaactagaacagtttcatcatcattatataatatgtttgttcaagcaggttcaattattgcatcaaatatttatcgtacacctgataaaccattatatcatacaggtaatgcagtattatttggtttagcattagcaatgttcccaattttactaggtactaaatatttttattggtatttaaataagaagaaagatgaaaaatggagtcaaatgacaagtgaggaacaagattattatattaaaaatacaagtgatacaggtagtagtagattagatttccgttttgctcattagtttacttttatttatgtattatctttatattattcccgttgtatatgtttattattttataattaattgattttattcaataaatctgctaccaattgaagtaaaaaaaagcattacgtaatatatcgctattaccttcccaaacccatcataaaaaaacctatcattctctccctcgctattacctaccgccaaatcactgataagaaaaagagagatagttcccccattcaaatttttttgacacatgtaaattatacttaatggaaggtattacatcttcacttgtacttaacggttaatttgaatttacacggcatcatttgtattacaatctattcccacatttttcatctataaataccccccctctattcccatatttcattcttattacttattcagtatatcctttcttagtaaaaacaagaaaacataatgtcattttcagaaccttcatataaattttatccaaataaaaatgcaactgttataagtgctccattctctggtggtcaaggtaaatcaggtgttgaagatggtcctgaacaattaattaaatatggtttattaaaagatattgaaaaattaggttggaatttaaaaaatgttaatccattatctgaaatggatactgataaaatgaaaaaggatgaaaatgatgtttacaataattgtaaaagaccaacaatggttagtgattgttgtaaattaatttataatgaagttaaatcttcttatgaaaaaaattctttcccaattacaattggtggtgatcattcaattggtatgtctacaatttctgctttcattaatacttatccaaatggtggtattgtttgggttgatgctcatgctgatattaataccccttcaacaactgaatcaggtaatttacatggttgtccagttgcttttgcaatgggtttagattctgaaaattggccaccacattttaattggattaaagaattgaaaacaaaggttaaaccaaatcaaattacttatattggtttgagagatgttgatgatggtgaaaaaaaattattaaaagatttaggtattaaagcttttagtatgtatcatgttgataaatttggtattaatgaagttgttcgtatggcattagaggcagttaatccaaatggtgaaaatccaattcatttaagttatgatgttgatggtattgatccaatgtatgctgctgcaactggtacacctgttagaggtggtttaactttaagagaaggtttattccttgttgaagaaattgcaaattcaggtaatttagttggtttagatattgttgaagttaatcctgctttatcatcatctgctcaagttcatttagaaactgttaatacaggtttatcaatcgctagatgtgctatgggtgaaactatcctttagtttcttaatacgtatagatgtatatagaattgtatcataagtaaataaatacctcgtaatgaattattaatgaaattaatgtaatcggtcttcctctccggtaccggaatcgccaaactgaaaaattcatgttgaaaaatttcaccaattatataaatttgatttattattagaagttcttttttctaccaaaccaatgacagaagataagaaggaactaccgccaagatatgcaggttttatagctggtgttttctcaggtgttatgaaaaatgctgttggacatccatttgattcagttaaagttagacttcaaacttcaactggacgttttacaggtccattagattgtactttgaaaactttgaaaaatgaaggtattaaaggtttatataaaggttttacacctccattagttggttgggttatgatggattcagttatgcttggttcattacatgtttatagaagatttgttaaagaaaatttttatcctgatgaaaaaaaattaccattatttggacattgttttgcaggtttattatctggttggacagtttcatttgttgctgcaccaattgaaactttaaaggctagattacaagttcaatatgatgcaaagagtaaaatttataatggtccaattgattgtgcaattaaattatggaaattagatggtttaaaatctttatataaaggtttaataccaacaatgatatttagaacaaattttattgtttggtggggttcatatgaaattttaacaaattattttaatgaaaatactaatttaagtaaatctgcaattaatttttggtcaggtggtttaagtgcaacttgcttttggataactgcttatccagctgatgttgttaaaaatgttattatgattgataatgctgaaaatccaaaatttaaaaaatattcagatgctgttaaatatgtttataatgaaagaggtggtttaaagggttttacaagaggttttgtaccaagtattttaagaagtttccctgcaaatgctgctgcattagctgcatttgaatttattatgagaatgttctaatattttagagagccatgaacatttatgttatgaaattaaaaatgatttagcatctggaatgttaatcatatgatactattactatattatttatttactaacctatttacttacttattttattatataaaactagaaatatagataagataaaaagaagaaacattatacaagtatgccatcactatattaagcgatttcatagtgtttcaaaaatatttcactttcaatatgcatggcggaaattatacctttattaatatttaccaacacttgtccttctttccattttacaattaccatgtcaagtaataggaagaagaggctatcaataatagacttttttgggaaatcaagtgattcctcatcatcgtcttccaaaaacaagaaaggacatacaagatcatcttcatcttcaaagaacacttcgtctaaaacaactacagataataaaacaaagagacttacattcacaatacctaatgaatcgatagttcatgaagattactctaaaatacctattcccttacctaaaaacagacctaacagaaacacagttcaaataaatagttcattaatttcatcaccggtacattctaatcatagtttaacaaatttatcaaataatagtaaaactaaattaactatatcatcaccagtttcaccagttattaagaatggactgtccccaaatgggagagatattacaccatcacgaatatatggtatgaatagtactcaaactacaccttcaaaggatagattagttagtaattctagtctttcatcatctgtttatcctaatgataatttgagaaatgtaagtaattctacattacctgaaattaatagagtttcatcatcaatttatccaccttcaactatattatttgataataataataatggattgaaatcaacaggtacgattaagagatcagatttattgaagaaacgtaaaccacctccgttaccattagttattgacacaaatgaaaataatgaaaatgaaaataaagcacaaactaaatcacctgtggaaactataaaacattcagcaacagaatcatatgaaagttcagatagtgggttttctccattaaatttgattaatgaaaatagttttattaataataataataataatttaccattatcacaaatacgaagtttaaatccatctaaaaatgtaatgtttacgaataaaagtgttgaatacgatccacctgaattcatatctcaacagtacgagaataatgatgataataataacatacataaacattcaagaacattatcgagtattgaagaaattaccagtgcgttggataacttccaattagaacatgaaaaatcatttgatttaactacgagtacgcaggaaactaatgataatagttcatatattgcaagtccaataagtgatagacatacaattgatctgaatatagacagtagtaaatttgatgaaagtgttgaatacaataataataatgatgatgaaaacgatcctggaatgtatgttaaagtaaaagatttaccacaagttgaaggtgaaacactggatgaatatattgataaactgaaagatattgcaactaaacaaccaaatgttagtgaagaacaattaactcatccaattgcaatgaaattaaaatctgctgatgtatctgaagcctcaagttcatcagatatattttatgatgttcctgaagctgtgaagaaatcaaatgaagatgttaagagtgttgtgtcgagttctcaagaagtgctaccacaggaaataccatcaaaagaagtaccaccacaggaaattcaaacatcacagaaaattctatcacaggaaaatatcacaccaacagaagataacttcaatggtgatgatttcaattacatatcatttaaggaaaatattgaaaatggtattaatgaaaatggtataagtgatgaagaattcaataatgaagaagattttattgggccactgaatgattcatttgaatcatttgttaaaactataaataccagtgataatacgaatgatgaacttgatcaatctaatgaaattaatgaagtttcaaccaatagttcaaccagtggttggcaaaggtatagtagtgcaactaattttttcagtaattatgatgatttaaataatgataataatgatgatataatctatgatgaaaaaaatttaattattgaaccaccaaaggatattactggtgatgaaactgatgaaaatgtagttacaccaacagatactgaatatgttatgaaagattctacaccacaaagagattttgatcttgaagatgaattagataataatattgttgaacatcaattagagagtaatagtatggatgatttttttcctaaaagtgaaaatgatgagtatgtggaggatgatagtaatgaagatagtagtgatgatactggagaggaagaacccggtgaggtatcaaattataatagatataaggaaatttcagatagtccaagtattgaacaatctgaggatgatttcctggaattttcaccaaaacctgccagtatttattctggagaaaacaatggttcacctgatttatatagacaaaattcaatgtttactaaaggtgtgttggagaaaatgactggtggtgatgcaactgggactcccgttgtcggtggtggtagagaacatttgaaagttgtcaataatgatgaagaagaggatgatgagaggcgtggtgatgatgatgacaattctattagtccgagtaattgcgaagataaaagtgaatatgcatatgataatatgattgatgaagaagaatataaaacagcaccaatacctgatcttgaatccgtaatagataataacgcacaatacaatgatcgtttatatattgatgataatcaaataatttcagcatatgatagaagagaggaagcagttgttaaacctattgaacattctaatataattacacctgcagtaccaatcacgggatggaatacaaatatgaattcaagaaacaaaagaccaccacctaattttgcaataactggtagaagaagtagaggattatctgagacaacggctaatcctgaattatttaccaatggtggtatcaaaaatgaacctattgaaacaccagtatcttttactaatgctgttactacttctaatactgttaacaatggagatgaaatgataattagtaatgaggaatcacgtaaaggagagaaatgtacatatattgagaacttacgaaccaagggacgtaaaacgactattactactaaaccatcattacaagtattaccaattgctattagacaaaatggtagtatatcacatagaaaaattccatcacaacaattatttagaactagattaagatctcataaacatattacagtcaaaccaaagactagaatgctagcaagtgaaatagatgatggagagttacctgatgctacaaaaatccatagtggacaacgaactaaggttccaattcatccagatgctgcagttatagcagcaagtgaacaatttgcgagaataaccaatcaacgtagtaatggtgcaatgaccaataacagtggagacttgggaaggtttaatagtgttatgagtgttagaccacattacggagacggtatgaagctattcatcaccaatcctgatagtgatgatgattagtagtagtagtagtataaccatgtataatattacgtaatataacaattttgagactttgagactttgagatacgtggacaatttcaaggccaatggtcaaattgcaacatgttttgattgatttacatgcatgttgtttcttctagaatttgagttgtttttatcttcttttacgattaagtaactgtagtcatgtcggatgctgcctacactttgatctatgaaccaagtacttcatcaaaatttactatcaatgagtttaaaactcaattggagaaaggtgatgatgaatccaaaattgtttcaatgagaaatattttaattacaatgattaattcagattcaatgcctgatttattaatgcatattattagatatgttatgccatctaaaaataaagatttgaaaaaattattatatttttattgggaaatttgtgataaatatgataatgaaggtaaattaagacatgaaatgattttagtttgtaatgcaattcaaagagatttacaacatccaaatgaatttattagaggtaatacattaagatttttaaataaattaaaggaaccagaattattagagactttagtaccaaattgtagagtttgtcttgaacatagacatgcatatgttagaaaaaatgcagttttcgcaatttattcaatttttaaagttagtgaacatttaatacctgatgcacctgaattaattaatgatttcttaaatattgaaagtgatgcaacttgtagaagaaatgctttcgtttgtttaagtaatttaaatagggaagcttcattaacttatattcaagaacaaccattggattcattagatcctttgattcaattagcaattattgaatttattagaaaagatgcacttaaatttaatgatttaaaatctcaatatttacaaattattacttcattattagatataagtaatactgctgttgcttatgaagctgcaactactttaagtgttttaagttcttcaccaatttcaattaaaaatgctgcttctaaatttgttgaattagcaaataaggaaagtgatataaatgttaaattgattgcattagagagaattaatgaattacatttaaataatgaaggtattttagatgatatttgtttagatattttaaaaattttatcaactccttcagttgatgttagaaataaagcaattgaaattggtttaaaattagtttcaaataaaaatgttgatgatgttattaaattatttaaaaaggaattattgaaaacttctaattcaaatgaagataaaatcactgaatatagacaatcattaattaatgcaattcatttaattgcaattaaatttcatgaaattgctgcaaatgttgttgatttattattagaatttattggtgaattaaatactacttcagctaatgaagttattacatttgttaaacaagttattgaaaaatatcctgatttaagaactaatatcatcaataaattattaatttctttatcaaatgttaaatctggtaaagtttatagaagttcattatggattttaggtgaatattgttttgaagagagtgatattcaattagcttggaaacatattagaagtagcattggagaaattccaattttatcatctgaacaaagattaaatggtattgaaaatgatgatgaaactaatgaaaatacaactacatctacaccatctggtccaaaaattttagctgatggtacttatgcaactgaaagtgcatttgatacacctgaaattaccaaatcaactaataataaatcatccaagacaccaattagaagtttaattttagatggtgatttctatttagcatcagttttatcatcaacattagttaaattaattttaagattaaataaagtttcagaacgtaaagatttaattaatgcattaaaggcagaggcaatgttaattatggtttcaattttaagagttggtgaaacatcatatgttaaaaagaaaattgatgaagattcaagtgaaagaattatgtcatgtgttagatttttaagtgaaggtcaaactgatattaaattattagaagaagcattcttagatgatacattagaagttttcaaacaacaagttgaggaaactttagcaaatgataataataatgcagcaaatattgcaaataataatttaaagattgaaaatgttgatgaaccaataagtttcagacaattcactaacaaggatattaaaattgttgatgaaaatgataaagaattagatgcagttcaagaaggaactaatccaaaggaagatttatcatcaagattaaataagattgttcaattaacaggtttctctgatcctgtctatgcagaagcatatgttaaagttcatcaatttgatgttacattagatgttttaattgttaatcaaactactacaactttacgtaatttaagtgttgaatttgcagcattaggtgatttaaaagtaattgataaaccaacaagtgcaaatattgcaccacatggattccatagagttcaaactacaattaaagtttcaagtgcagatactggtgttatatttggtaatattgtatatgatggacaacatgcagatgatagtacaattgttattttaagtgatgttcatattgatattttagattatattaaaccatcaacatgttctgaaactcaatttaggaagatgtggaatgaatttgaatgggaaaataaaattagtattaattctaatttaacaagtttaaaggaatacttggatgaattattaaagagtacaaatatgaataatttaacacctggttcagttattggtgattgtcaattcttatcagcaaatttatattctaaatcaactttcggtgaagatgcattagctaatttatgtattgaaaagagtaaagaaggtttaattactggtcatgttagaattagaagtaagggacaaggattagcattatcattaggtgataaagttgcagcagttgcaagaaagaacaataccgttactgtttcaactgtataattataattataagtaataagtatagtaaatagaccttttatagcgaatatttccattttggtaaatcttacgtcttttgacaacatgttatgtccaatgtctatcatctcttcaatttactttcttttcttttgacgtacagattatactcagtaatgaactatataaatacatttcgagaggtttatcaatacgatgatccattggaatcattaaaaccttatgtagaaacttttattaaaccctacattcctcaatcattacagccatatgaaattatttcaaataatttacatacattattatttggattatcattatacacaacgttatttcaattatcaaaaatattcctgtttttcaatccacaaatcactaaggcactgaaaagtgaaaagaataaattagattgttgtgttagaattgtttcatttattcaagcaattattatttgctttttaggtattccagttttcaataataaatatttgaatattgatcatgtatttgcaacaactccatattcaaaattttatacttcaatggcattaagttattttatttgggatacaataatctcaacaatttatgttaaatattttggtgttggatttttaattcatggaattgtttcaacaattgttttcacaattgcagttgaatataaatttattcaatattattcagcaattttcctattatttgaaatttcaactcctttccttgatataaggtgggttgggttaaaatttaatgttttaagtgaaaatgttaaattaattaataatatcatattaattttaatcttcttctttattagaatttgttggggttggtatcaagttttcagattaggtattgatttatatgatgctcagaatgaagctaattttactacaattggtgcaataatcattttaagttgtaattttatacttgatatcttaaatgttttctggtttagtaaaatgatgacagttgcaattgaaactttaaaaggtatgctaggatttaaagttaaaactgatgaaagtaagattaaacttatgtaagtgttcctatataatacatattatactactacaataaatttttacatttagagtaattaggattagataatttctctaatccgattttaacatcaagtttaatatcattaattaatgcttcaacacctgtatagtttaattcaggacgtaaataaccacaaataacacttgatatatgacaaccatagaaactatcattaaattgatgaattatgtaaatttcacaagttttttcattattaccataataaggattccatccaagtgacataaccattggtaaaacatctaattcttcatctttaagataatgaccatagtttaattccactgatgatttaccatctattctctctaccttggtagtttcagtattgtcactacttactttgaataatttagcaaatccaaaataaacaccaggttcaagattttgcaatacttcattatctttaacgtttatattagcagttgggaatccaagatctgatgatccacgtccgaatcctggtattacagtgcttttattaagtaatatggggaatggtgtggctggtgagtcaggtatttgtggtctttccattggttattgaaaggaatgcagtatccattacatgaaaaaacatttgtgttgttacatgacaattaaactggttttctataatctataaaataatacaaaaatattgacacagttcaaggttctaagttagggaatgacttcatttgaccattcatccattcttcacctaataacttcaatctaactctacttgctgatgatttaccatcaactgatgtccattcatttacaattaattttaataatttaatactttgtctaccataagcttgtaaaaattgtattgcacatgcatcccaccatgcaccaactatggtaaaatggatttcatttaattgatttgttggtatatctaataatctacttaaaaatatccatgaattagaaattggtaaggggtgaacaatttgatcattataaccaataaatgattgatttatctgtaatctcgttataactgaataaagagttgaaatacctgataatctttcattatattgaatttcattctcccatttattagtagtttcatctctattaaatcctaaacgtattctaccctcttcagtttcatttgaacatgaatatccaattaggaatggacattttgtataaaattttgcaaataggaaatattgtaaatcattgaaaattatcattaaattaagtgttaattttgccaagggtaatgaagattttggtttaactgaaacttcagtctccgcttgtgaaataattgcatctgatataaaatttaaaatccatttaaatgctaattgattactctgtgtttgtttaataagttcaattatttcactggttaatttactcaattgattttgactattggttaattgaccaaatttaggattaatcttacgtttatgaccaccaacatttttctttaattgtaaatcatttttaacgggtaataaaatttgagattcaatatctttaatatcttgtaaatatttattaaactctgtctcgatttgtgtaggtctaataattgaattagtttcaagttctttaagtcttttaatttcatcttccttttgtttctttaatgcttcctgttgttgttgtaatttcaattctttctccctttgtaatttttcctctctctccttcttctccctagcttccttttcctgttgttgtttaattctcaattgttcttcctcaattctctttctttcagcttcctccttagccttacgttcggcttcttccttagctttacgttctgcttcttctctagctattctttctgcctcctccctagctttcctctctttttcttcaataattctccttcgttcctcttcctctttacgtattctctcctcttctaattgaattaaacgatccacgctatctttatgctgttgacgataatttaagtactcattagtgaaatattgttctaaattgggtaatttatacgaatgaacgttatcctctatattttccttacttcccttactctgttgatgatccttcctagtactattctccctagtggaagtactatttgatccaataacgatactctcagccagatcagcggctctgttgaatctctcagaaagtgaacaagagtccaaaaactgcgttaaatcctccaaagaagagacactagtgacttccctaccatccaccatttcaccaccatcactgtcactggtactgtcactctctacgtgctcatacactgcaaaacgcatctaccccaaaggaagaacccactataataaaccatcatatattcaacttacccgccctctaaataaattttccattttccaccttcaactgcttccatttcttatagaagatccttttaattctttcttgtagatcttcagagaatataacccataggatctccatagtatacaatgacgttggtatcggtacgtagtttctcatcatctgtttcattggggaaggcggcttgtgcacaagttaagccagttcatcataaagttagaattattaaaaaaaatctttcaccaagattccctgaacttaaatatccaagtcatgatattaaatcaccaaaatttagaccttatttaactcatttagatagagttgatcatcattatcataatgttttagaatcagatttattattaataggttatagacatggacaacaaccaatttatggtaataagagaagacattgggatatgtcatctccatatcaaattaatagacctttaagaaaaccaaagggtcaaattgttccctcacaaactattaatccaagagataccggaaatattgctaaattacaaagtatttcaatcaactgttttgttaaagatgcaaaacaatatcctgcaatggcaattggtgcaacattacaattacaacaaataactggtgttaaaccaaaacctatttatgcaaagacaaatgttccaaattggaaattaagaccaggtatgaaaatgggtgctaaagttgaattatttggtagagatgcatcccaatttttatcaactttaacagaaattgttttacctagaattggtgaatttaatggtatatcaaatagagctggtgatagatatggtaatattgcatttggtttaacttctgatcatattaaatatttcccagaaattgaattaaatcaagattcttggccaaatttatatggttttgatataactttacatacaactgctcaaactgatgctgatgctagaattttattatctggtttaggtttaccatttgttggaagtgaaagaatcccaaaaactttattggatgatcttaccgttcacccttatgaaaattagtattgtatataatatctatatttatatttagactttatatattattaaaacatgtaaataattatactttagggtctttaccaagtaaaataaattttcttggtattttaatattttcattattttcatgacataataacatcatgttaggtattataataattaattctgtttatcagtaacatcttctttcttttcaaacaatggcattacaatcacttttgggactagtggggaagtctcaattgattcaaccctttactgatcaatgtattatacctcataattcatcaagtgaagaaatttgtcgttatttaaaggataatgttcaaatatgtaatgattttacaaatttatcattaaaatattattattgttccaatgttaataatccaatcttatccaatataatcctatggttaattatctttatatcaattggtttattatttattatattaggtttattagcatctgattatttagttccaaatatgtctgcattatcagattttttaaatatggatgaaaaattatcaggtttaacattattagcatttgcaaatggatcacccgatatattatcaacttatattgcaatgaataaaggtatgacaacaatggcaattggggaattattaggttctgctaattttgcacttactgtagttatcggagttatggcaatttataaaccttttaaagttaatcaaataactttcactagagatttaataatattttcaactttattgatcatttcattaattatcctatttgatggtacaatcagtatttttgaatcaattatattatgttgtctttacattttatttattatacttaatatatttttaccaaatcatgaaaaatatgaaaaattagaatcaagtgatgaagatattacaattgatgaacaaaatattaataataattcattaacacaggttaatttatcaacattaccgaatgatgaaattattagaaataacaatagattatcagttatatcgatgaataatgatgataatcttgatagattaagtactacttcatcagattctaatgcaagtatgaatgattattattttgctcataatgtcgataatttagatcaaggtaatggttataaaattgcattaatggattcattaaaattagcttggttatgtaaaaggaaaacatctaggatagtaccaccttatgatattgaacaacaaaataatgaagttataccgttaaattctaatcaatcatctcaaagtttacaatatattgtacgagatgatgatgaagaggaagaggaagaggatgatgatgaaaatgatgatacaattaataatgatataactaattcaacaattacaataaatacagtacctaatattaaaactacacatacaggcgatagtgaaattgaaaatgcaaatagaaatacaaatacaaatacaaatacagatactaataatattgacccaccaggtaaattggcatataaaaataaatctcatagtagtacaccaatcctttcacgattaaatagtaagaaaagtaaagataaaaatgattatcaaatattattcccatcaagacaaaatagttcaattaaaagatttggaagttcattaaagttgaatactaatttaccactttattcacaaagatctacacctcaagcacctgtggataatgttacaccatttaagggtaattttcaaataattgatgaagaagaaagtgaagtacatagggagatacctaatgattctcccattgatcctatgagtagtaatgttaataccttatcaatacctgagaatacggttaatgaagattcaatcaattctatcaattcaatcataccatatattgaatatcagaaaactgaaaacatgtttgcaaagattttcccaattcatatttttagattatctacctcatttggtgaaaaattattaagtattataattataccattttcaacaattttcaatataattataccacaaccattaccattagaacttaatgaagaaatttataaacatgaattatcaattagtacaaaattattccatttacaatcaagtatattagttttacttatgtctgattttgaaattaatttaataataattttattaatgattttattcccaactatgtcaatcgttttccaaaaactttcagttaaatactacaatttagttttcccaccaatttcagcaattttcggattcctaacagttttaaaacttataactttaactgcatcaataatcattcttttattaaaatatttagctataatttactcaattaatgaatccatccttggattgaccattttatcaataggtaatagtattggagatgttgttacaaatttagcacttgcaggattaggtcgtcctttgactggattacatgcatgttttggtagtccattactttatatattatttggagttggagtttgttcattaattattcaattatcacaatctaagaatacaattgaatttacagttgattcaagtttaataattacatcaattagtataatttcaatgcttattatgtatagtattattttacctatcaatggatggacatttaagagatggatgggtgttatcggtgtggcagtgtggtttattgtaacttcattcaatgcaataattaacggtgttaattgagtatagtataatataaaaaccacagtttatatccaccacaaccaccacaattgtggcttaaatgaaaattattggaaatttcaaaaatttttttgaaatgagatgattgtcccaaataggtaattttgatatctctgataagcaacttatgatggataagtttacagtgcccagggtataaatactatgcaatggttctttatttttgatatttgctctgccccctggtatatcttattcatatcactgtacaacgctcagttagcaaaataaaatgtcagttttaactagaaattatagagattcatcaattcatttccaaaaagatgttgattcaaaatcaactgatggtattttaactgtttctaaaaatgatcttaaaagattaaattatcctcaatgggcaccaacttgggatccaaaggatgatcacgcatttgaaaatattaaaccttttaaacatattgatagaggtttatttggtgatgaagaatttaaatcattaagaaatgttgaaaatactgaatttaaacatgtaactccaaaattaggtttagaaattacaggtttacaattaagtgaattaacagataaacaaaaggatgatttagcattattagttgaaaaatttggtgttattgcatttagaaatcaaaattttaaaaatttagaatttgatgaaattaaaaaaattggtgaatattatggtccattacatgttcatccaacttctggtgctccattaaatcatcctgaatttcatatgacatttagaagaggtgatagtaaagaataccaaagagaatttagtgataaattaactagtattggatggcattctgatgttacttatgaaaatcaaactcctggtattacatttttcacaatgttacaaactggtgaaagtggtggtgatacacaatttttagatatgtttgaagtttatgatagattatcaccattaatgaaaaagaaattagaaggtttaaaagttgttcatacatcaaaggaacaagcaaatgcagcaaagcaagaaggtggtattgaaagaaaagatccagttgaatcaattcatccattagttagatatcatccagttttaaagaagaaatttttatttgctcatagaggtttttcaagaagaattttaggtttaaagagtgaagaaagtgataatttattattatttttatttaaacatacacaatcatgtttagatgcacatgttagaatgtcatgggatgaaaatactgttgttgtttgggataatagaagagttttacatacaagaactttagattgggattcaactgatattagacatgcatttagagttacaacaattgctgagagacctgttggtagtttagaggaatatgaatcttggacacctgaattagaggaagaaaatttaaaattaaaagattattatttaagcttatcagctggtgaatattatgaaaaagttattaaaaataattaaactggttttaaattattataatagtttcttttcataatcattattttacattcttttatttttagtttacaaaattatataatcattatataatatattcaaatttgggttttttaaaaatattcacattcccaaccatttgggaattttttatcttccaatattgtaggtttattataaaaactcataaattgttttctagcctttaaataattaaaagattttttattcttatatttttcaaaaattttagataatcttgatacagttattgatgaataactaagcatttccatgaaaaggtaatcaaattgattctctaattgttgatttttcaattttgatatttcagttattttagaaataattaatttttcaacatttgaaggtaatgtaaaatgttcaatttcaattaatttaataaataattgataattatatggtaacaattttaatccctcgtgtattattgcctttgcgttatcaaattctaatgttataatgtataaatcaataagtctaattctaatttttaaattattaatagggttcatgtaaagaccattaattaagattgattttgccttagttatatcattcaaattaagataataattagaatatttaatccaaaagaaatgatattcatttgtcactatcaaacatctattatatagtgtatcaatttgattaaaattatttttcaataaattttgttctttatcctttatggctacttttaaatttaaattttcaacatattcaagatatgaacgccatgtctgtaattgtaatcttgtaagttctctatgaggtatgtaataattaatacctaattttttctcaaaattgtaaaatttccaagagtgaaattgtgttgtgatgtataagtcagtaaattttttctttaattctaattttaattttttaaaattattttcattaattaataaatcaacccatttaaaatttgttaatttctttaaatctgatgatgttataatatatttaattgattttaaatcagcattttcaattaattttaaataaattttaaaatattttaaatattgatgttgaggtacttgaattataattcttaataataaataatattcatgaattaaatttgtatcatttaaaaatttaagatatttatcatagaaaattgatgaataataatgataacctattgaaattctagccgtttcaaaataaggtaaaagattttcatcatttgggaaaattttaagtaataaatcaagataagtattccataataatatggaattgggtataattttcaatgatcttttgaaagtttcaattgatttagctatattattgaatttgaaaaaccaacgagcataattaatccagtattgttctaaatatggatatttaaccaataaattctcgtaagaaagtattattaattttgatgaattagtactttctgatattttaataaagttttcccatttagtgaaatcatctgagtgattggctatatcctgagcagcaatagaccacttatcgggtatctcagacatgtcaatgtgaattgtactaagagaatgtcttcttctaatgacttgtaaagttttaaaatcataataataataataataataataatagtcctcatgtaaaaggtctaacacacagattacgtaacgtcacgtgactgtatgatcaggaaatttttcaagttaataaaatccattttattgatttataggaatggcaacttggttctttaatgactcttgttcctttcacaatctttaagtattcaatgtcaggacgtacactttataagaagcttataacctctattgaggaaagtagtaaatcagcacatttagcacataataaagatttattaaagaaacaagatgcattagttcattatcgtcgtatgcaatatatgcaagcaggtaaaacattaacaactgaggatgatagtaaattagttgaagaagttaagaaacaatttgctaatgagataccaaaagttgatatatcaatggtggctcatcttgataaagattcattacatccagttgaagtggaacatattaacaatttatcacttttccttgattcacagagagaatatgttgccctattggagagatacaatccaggtatcagtatgaaacaaacagacaaggttaagaagacagctagaagagttggtcttgaagtacctaaatagaatgagccataaagtaagtactcttatattatatagacgcgactctgtacatagtaaaaatttcagtttccattttaaatttcacttaggggaaaaaattttattttccaagacatgaatttttcactcttagaagtagtagtagatactacacttctttagacaacaatcaatatgggtaaatctgaatctgctgactctgttgacaactacgatcttaaactcccttacgttttaccatttgctcaacctttagcaaataaaaaattaaataaaaaacttctgaaaactgttaaaaaagctgcaaaggctaaacatgttaaaagaggtgttaaggaagttgttaaagctttaagaaaaggtgaaaaaggtttagttatcattgctggtgatatctctcctgctgatgtcatctctcatatacccgtcttatgtgaagataatggtgttcaatacgttttcattccttcaaaggaagatttaggtggtgccggtggtacaaagagaccaacaagtgttattatgattgtaccagcttctgataaaaaaaatgattataaagattcttatgatgaaatatcaaaagaagttcaatcattataattataattatgtgtgaacttttaactacattttcaaaaaaaaactttctaattactatataaaaaaatcgtacattatttatatacaatatataatattttaaactattaggtataatacaatcaacaactctctatttgaaatatcactccttttttaattgtgctctaacccatccttctaatccaccttcaattataatttcttgtaaattagtacctaattctccaactttattagttaaaacaatttcacctttatcattcttaattgtaacaacggattttggaatatcccattttaatgtccatccagttcttcttgttaattcactttcactatctttaaattcttttcttaataaattgattaattctggtaattctaatgttaataatgcattattaatagaattacgtccgaaaatattactaaatgaacctgctgcaactaatttaatatctcttgctaaaattgcagttgctgcttgttctcttgatgaacctgtaccaaaattaaaacctgaaacaataatatcaccagctttggtcttagaaccaaattcagaatcataattttccatacaaacttctgccatcttctctcttgaaacatcatcttgatatgtatatttacctggataaataccatcagtattaacattatctgcatcacagaaaacaatctcaccttcaatactttctgggaatccttctaatgtacttgatgctgatgaaccttcagatacatctgttgataattcatcattctttggactattaattataactgttttcttaacttcattactctttttacatgattcacctaatacttcctctggtgatgcaatcttacctaaaactgcagatgctgcaacaacttcaggtgatgctaaatatgctaatgcatctttggaacccattctacctttgaaatttctattagttgcagaaataccaacttcaccttcttttaataaacctgcacctaaaccaatacatggaccacaacctgcaggtaatggtttacaacctgctttaattaatgtttcccatgcaccatctaattctgcatctttttgaacttcagatgatgcagctgcaatataaaattcaatacctggtgcaatcttattatctttaacaacatctgctgctgccttaatatcagataatctagagtttgtacatgaaactaaatatgccttattaatcttaatgtcttgctcacttaatttatcaactgatgtaccaattttaacagaatttggacctgaaatatatggacttaaagttgataaatcaattcttaaagtttttgcatagaaagcatccttatctgcaactactttattattaattaatttttctaatgtttgattattaattcttggatgatttggtccaactcttaataatcttttattataccaattaattaatgtatcatcaattgggaaaacaccacttaatgccccccattcagttgtcatattagcaattgttaatctataatcaattgataattctttaactgattcaccagtaaattcaattgcatgatttaaaacttcatcattattaaataatccacataatgcaacaattatatctttacctgatgtaccctttggtaatttaccctctaggataacattagcaacaggtggaatttgccaccatgtttgaccagttgcccaaattgcagctgcatcagttctaacaactggtgtacctaatgcaccaataccaccataagtatttgaatgagaatcagatgcaacagttaaattacctgggaatgcataaccttcctcaatcataatttgatgtccaatacccctacctgcaggatagaaatcaataccttgctctttagcaaaattttcaatattttcatatttttcaacattcttttcactcttattttgaacatcatgatctaatgtattaacaatttgtctattatttttaacctttttagcacctaaacctttaaatttaagtgcaactggccatgaattatcatgagacataacatgagcgggactaatagagacataatcacctgaatgaactaatttatttgctggtaatccaactgaatatttttgaacaattttttcaattaaattttgacctgcaagtaaatttctactagttgcaaaagttctagcagatctttgaattcttattctagtattaatactaaacatcttgtttgtataaaagtaatgagaaacaaaactataacagaaagaaagtaacttaaagaaaaccaccaatgacagtgaacttattaacaacttcaatcatcattatgactcaatgaaaaaaaaaaatggaaatttctgaaaaatccgccatcgttgacttctccgattaccgtatcgggtaatcaccactttaaccgcgtattttcacagggtcttttcttagtaactttaatctataaaactctttacaaactctttatacaaaactattcactaagacggtaatgatcataacttaaaatagcttccaataaaacacggaatccagcttctaactcctcaggttcagtatgctcacatggattatgagaaacaccatctttacttggaacgaaaatcattgcggttggaataactaaattggttgcacatgaatcatgacctgcaccactgaccattttatgttttaaatcttcaccaacaatattaattgctgctttatcaataatttcaactaattttttattaaaatgtgttgcaggataaggatatggatcttcaattgtgtattctaatttaactccattacctgctttatttaaacatgcagtttcaataacttccaaacaacctttacgtatatttactaaaccttcgtctgtttcatgtctaatatcaagcacaaaatcaacatcaccagggataacattaacaacatctggcaataaacttaatttagcaattgatgctaaacctttaaattttttagcaacttcattaattccaacaattatatttgcagttgctaataatgcatctcttctaaattccattggggttgtaccagtatgttgtgacatacccttgatattaatacttaaccaattatatgcttgtgcacctgttaaaacaccaatttttttaccatatttttctaaaactggtccttgttcaatatgaatttcaaaatgtgcatgtaatgggttagccttatatgaacattcaacatcacctaaatatttaattctctttaattcctcatagacagtggttttattatcataaatatcctttaatgcataaatttcctcctttgttttaacacctgcccaaacacttgaagccattaaactcattgggaatcttgcaccttcctcattacaccaatcaactaatgtaattggaaaatttggtacaaaattattagcctttaatgttcttaaaacttgtaatccacttaaaactccataaataccatcatatctacctcccgttggttgtgtatctaaatgagatcccataccagttgcagcagcattattattcttacctggatatgttgcaaagatattaccacattcatcaattttaattgtacatcctaactttgttgtttcttcaatgaaccaatcttttacttgtttatcaatatctgataatgctaaacggcaaacacctgtttgtgttggttcaggtccccaaactcctttagctccaaattgatcagcagtggagtgaatagtttcaactaattcctttgaattaattttaaaattttgactaaaagttgtaactgtcatttcttcgattgtttatttttgttttctataaatattatatatttctttaattaaattaaggcgacatctacgggtatttatatttaaacagcaaagcttatcattcatgacagatgatctctcaaatcggcaaaatgttatctgcaatttcccttttaggaaataagctcgcttgaaactggccgcttagtcttactccgaagaatagactaattaataccgtatattatataccaaattacaacccgtatttgtctgggtcttcagcattgtactcggcaatcaactcatctcgggatagtgtattcataaaagcattatcatctgcaaaagtgtaaatttgcaaaacttcattccaaaaagcatcaacatttaaatcaagcagacaataaattccatcttcaacatcttccttaacagattgaatgctaccataatttgaaggttcaatactaatttcaaattttcttctcttatattggaaatcaaattcttctgtaatattattgaattgtaataatgccacaactgctactggatcatgaataactgggcctttataatttggtttattcaatgttaacatacgtttattaaatgagtctatcaattgaaacagcattgctctaaaatttgatgttgtttcaactgatttacctttcaatactcttttttgaatttcatcagtgataaatattttttcagttatatctaatgaagcttgaattattcttgatgataaaacagaatcttcaataattattttagctgcaaatggatcacaataataattaaattctgcattattatttacattaaattttgtaaaccctccacccattatagataaaaatttaattttactctttaaatgtggatactctttgaaaaacactgccatattagttaatggaccagttgcaataatatttattaacccttcataagtttctatctgctttgctaaatatgggaaaaagtctttattatccttaggtgtcattcttgatgctaataataagttagatccgtttaaccccgtttctccatgaacatatgatgcattaacttctttataattattaagtgggactgtttcacctgggaatacgggtatatctgttttattaagtgctgttaataatcttaatgtatttgaagttgtatattttaatgaaacattaccatgaactgtggagattcctaaaagattaaaatatggagagtaagttgcaacaattattgcaactgcatcatcttgtccaggatcacagtctagccatatcggtattggttgagatattgtcatattagttattatctataaattcaagaataaataaagatataaagaatataatcaaccgttgatcggacaataacttgaataatctgtcactgtgacattgcaaagaggcttccatgaaaaaatgcggggacggagtttccgctttgttagctattatatgaggttttttatgatgaaactttctttcacaggaaattattcagagtgaccacaatcaatcgtggtaataaactagttgtctttgtaaataataaaacagaataccttcagactgataatagaatttaaaaagagatctatagaagaggaacaactataaaaataagtatcaaaaaataaatgcgcaagccaggaatcgaaccaggggctcaacgatggcaacgttgaattttaccactaaaccacttgcgcttattgtttttgttgtggtattaggaaatcctgcaagctgttgtatataaaaatattacgtaatcaatttaagttgaaaaagatctttgcaatacaatgtaaatttatagttgctgtaagcctacttaatactactttgtcggtaaaactggtatgtgagtagttagttcagataaaacttgattgtgttttatcaaaaactctcattttttaagatgacctgcttaaaagacttaatgcatgttaattaagtaccatttaaaattactaatttcattacaaaccagctcgatttaccaaaaggtagaatctataatttagttctgcatggcattacagtgtaaactaaatcattaatttaataactcttataccaattgattttctttcccaagtctccttgatttgatctgttggaatctaacctttctttgtgcaggattcatctttacaacaacaacgatattaaaggaacaaactatatgattcattaaaataacttaaagtatataattcattaaaataacttaaagtatataaaataacaacataaaagaaatattaacaaaccttggaattcttcgttgtacttatactaagaattccaactttgactataattttttttctgattttagagcaatacttaaatatattattggtccttcgaggttcaacttaataatacaatctcattgtttattattcaatctggcctagagttaccaatgtcaacatcctaccatactcaaaaatcaatcacatcattctgtaactacttataatgttaccagttttatcactgttatctttaattagatcctcctccacaacatcattaaaaatatgcttaattttaattatttcctgttgagagacattcttttttgaacattatctttgtcatgtgcatcactatttctaccattttgatctaaatttctataaagtaactgaccaatctcattatgtttaactgtagcataatattttggataattaaaccctttcaataactttggagcagcactgtagtttttacccatatatttgtgacacctctaataaaccaggagaaacttaatatattaaacttcactacttgactatgtgagtaaaataaactttttattctgaaaaatgaagtataccaaatttggatgcccttgtgattgacaaaagaatctgtatgacatccggaacataatgaacattgtgtagagttatttaataaccagaaactgggtaaactaatttaacccttccaattcccttaacatctaaagcatctttagcaataccaaaaatcttaccactaattattttaaattcctcaaattgcactttatgggtacttatatgagtatttaaacaactatccagcaagtactttaatgagcctggtaaggcaacattagatgccgtccatgcaaaaccactagatgcaaatacaaaaagaccgggaagttaacatcttgagcatataatttcatctaaatttctttcaaatgatattcttccaccattgtttccgttttttctgtctgttaacacttgagagttgttagaaacagtgggggtaaaatcttcaagggcaacttcgacagttgaaagtggtaaaccaggatttgggcattctaaaataaattggtagcacacactcttaaaaatggtcaaagattctccgagaaagagttacctttatttctagcatcagcagtagaatttaccagggcagttcattttctagcacaaacatgtgaatatattcttcttatctactacaacaactcaaatccaacaccagtaagaatatcttgaatttgagcactcaaaacatcaggggtattaggggttgacatcgtgtggtccactattttttttcttttttctttttttgctttttttttgagttaattgtgctaccatattatgctttttttcaatggcaaaataaactcattgttaatgatactaggcaatataaactcattataagctttttaggcaaattaaactcaatttacttgtataaatgagcatgtaaccccactctttttgtaagaatgcaaacttgtaaactttcttttacaacaaacaaactaaaataactaaaataactagaaatgtcttgtgcttgctctacaccaaaaactcaaactactaacccatgtttatgtgatgatagtaaatctaaaactcaacaagaattaccatcatgtgcatgtccaaagaaatgtcaatgtggtgataaatgtcaatgtgattcatgttcagaaaatgaaaataattgtatttgtcaatcaactaaatgtgtttgccaaggaacttgtaattgcaaccactgtgaaacaataaaatgtgcttgtcctgaaaatgacaattctaaaggatgtgcttgttaattgaagtgtttaattttataaataatatatatatatagtatatgtatatcaatttataataatgttaaattctttaaattcaattgtagatctgtaagtaatgaagttttcaaaaaatgatcaattcttaacttgaaaaggttcatactcagtttgatctttctccttcatgccaatagtgtataaatttgcaattctcctttatttgtgaaattatcattttattattcaatttagttaattttgttaactctgcatcatttttctaatttccaattaaattgtaaatattaccattatttgtacgtacatagtttatacctgttaccttcaaatttagtatttttttacaacgaaatagttgtttttgaatcattacagaaattaaacatgctatgaatttctaaaattagtatattttcaccataattaaaattgatggtaactaaattatcaaaataatcaccaaaaattataaaatcttcagaatatacataaatagcagatattaattcccatataaataaaagtttaagtttgattaatttatttgatgagttaattctagttaaataaatacctgcaaatggatcaattaatatgtttaattttttctttatttttaagttattgttctatgattttcaacttgtgtgactttattagagaaagtaattataaatttaaaatctaatttattttcaacatcatttttaaaaacttccaaagctaagttaaatggtttctttataatcttcatataataacgagatcagttttcaatttccttgtaacggatatattgataagtaaatttaaatatttttacaaatttaaacttatttttttattatgtgttatatttgttatttatggttttttcagagcattttattaactaatgtcaaacttgatattcttctttatacctgtgtaccctcataatgtccaaaaacatcgtttttgcggttaaattgcggctgggagattaaaaatcgaaacacagagagtaaatcaaaattattgttacagttgatggggctatggctcaatggtagagctttcgactccaaatcgaaaggttgcaggttcgattcctgttggcctcaatcagttaatttttttagtttttctctatattaaacatttgtctccaaaatacatcctctttttctactaaattgatattaatctctaaccatttatttttctaaaagtaagcttaaacacatatctataaaattttcccgctgttttcagtaaactatctaatttaatttaataatacattatttttttgattttttcttacttttcttaactcttgaaggtggtgcagcatgtccacttgattcaacatgttgaaatagtttatttctactagtaaactcttcgttacatacagaacataattctttaattgtacttgatttttgcgtattagatttgatatttgtctttattttagatttctttgatttatttggctttttagatgtcccccaatcatcatcactctcagaatctaaactggcaccatttagtaatttagataattcatcaagtttttcatcagttttatttttctttgatggttcggtagatttgttaggttttatatcgtcttcatagatatcatcatctatgttatcatcaatttcatcatttatactatcaacagtttcttctttaatatcatcatcaataacttcatctttcacatcggctggtatttcatcattaaaatcaatattatcttctttctctttcatcaattgttcttgcattaattgctctgcaaacattgcttctaattgttcatttgtaagatcatccaaatcaccaaatgattctaacgcatcttcaaattcatcatctaaatcatctaaatcatccccatcatctattgtctcctttatataattatcattatcaattccaagttcaataccttctttcctcatttcccattgtaattgttttaataatttcaaatgtttctttgatctttcatgatcttcaaattgtttctcacttttaaatactttatcacaaataacacattcaaataaatcatcattaatgtccaattcattatcagattcttcaccattaatcctttgttcctctttatataacttatctaattgttcctcaatttctgccaaatcatctggatcaacagtttgccaatcttgttcctcaaataattgtctctgtctttgtctctcttctttctcaatttgtgcctgtcgtttcatttcctctctttgttgattaagtttattcttttcataagcttttcttgcctttgaatcaattctactatcaatttttttaataaaattaataaattttctaactgtttcattgaaaagtttctttgattgatctcttaattttttattctccttttccattattcttctagttcttctatcaggtgccattgaatatctatattcatcacaccaagtaaaagttttaacagattggaaatttgaccaaactttataaaacattctagttgattcaaaatttgattttgaattaccaattcttgggaataataattcttttggatcacaaacagttgcgaatggtgtatcatctttaaaattattaaaacctggtaatttttgttgtttaccagatgtgacttcctcagatgcaattctatctaataatacactaacaatactataaaatccattaattgaatcatcaaatttttgataaaggttaacatttaaatatttttcaatatcatcaacttgaatacctgaataataagtttcaaaattttcatcatcaaaattatcattatttgaattactgttttgatcaccatcttctcttaatatttgaaacttatgagaatcataccatgatctctcctgtggatcacttaatgtttcatatgcaactctaacttcattgaaaagtcttgttgtattttctatatcatcaggatttttatcaggatgtaaaattaatgctttctttctgtaagctttcttaatttccaaagatgtagcagtttcctcaattcctaacaatatatagtaatctgtcttcatccttggtctgatctgctttttgaactaatggaagatctatttcaaggtcaaattatcatggaaattgtgaaaattattgatgttccaaaaggaataatgaaaaatctctaatattcgacgcgacagccccttttccctcacttgaaatttctcatgtggacaactcatttaattgttttggatccaattgtacgatcagcaactgcttttgatttaggacttttactgggaactactgcaattaatacttagcgatggcagtattggcagcatctatctgtacacatggtggtaaaccaattatttcaagacaatttaaggaattgactaaggaaagggttacttcattattattaaattttccttcattacttgcagagagtaatcaatcacaacatacttcagttgaagatgaatttgttagatatatgtttcaaccattagaagaattttatgttgttttaattactaataaacatagtaatattttacaagatattgatacattacatttatttactcaatcaattacatcaattttaagacatgttgatgaaaaggaaatttttgaaaattgttttgatctattaagtgcatttgatgaaattatttgtttaggttataaagaaaatttaacttcaagtcaaattattaatttcttagaaatggattctcatgaggaaagaattcaagaaattattgaaagaaataaagaattagaggctgcagaggcaagtaaaaagaaagcagttgaattacaatttaaagaaatgatgaagaaaaatcaaatgtctaataacaatggtcaatatgctcaatctatatttaatacaccaattgaagaatttcaaccatcatcatctattcaacaacaacaacaagaacaatattatcaacaaaatgaatatcaaccaaagcaatcacttttatcacaatctaagagaggtggtatgcaattaggtaaaaagcaacaatctgcatttggtgatagtcaaccattattaattaatccaacaaattctcaaagacaacgaaatgttgaattagattcatcaaatagtcatatacaacaacaacaacaaagtcaaaataatcaacatatacctaaatcttctaataaaccacaaattgaaaataatggtattttacttacattaaatgagaaatattcagcacaaattacaagggaaggtacaataacatcagctgaagtgaagggagatttacaaattagaattaatgattcaaatttatcatttgctaaagttaaattattattaaattctaataatgatatttcaactcaatataaaactcatccaaatgttgataaacaattatttaattctcaatcaattattggattaaaggatccaagtaaaccatttccaagtaatgatcaaaatttaggtgttttaagatggaagagtaatttgaaaaattttgataatggattaaaattattaccaattattttaacaacatgggttaataatgataataatggtagaatttctttaacatttgaatatgaatgtaataatgataaaaatgttgatgaaattaatttaattataccaattattaatgcaagtattgaaaatagtgaaaatgataatgttaatttacaatttactgatgatggtattaatattaaattaactaatttattagaaaattcaacgggttcatttgaaattttatgtaaagatgttgatgatgaggaagcattattcccaatggaaatttcatttaatgaaagtaaaaaaattgaagattcaagtgcaaatgataatattcaagtatttattgaagatgttattagtactgaaactgatgattcattaccatatgatatttacaacaatgcatcaagtgaaagttactacgttgtttaagtactttatatattgtaagtagattatatatattataacagttaatcaaaattaaattattaaagtaaagtaaagagtaaagtaccttaaggatagaaaaatttcaacactgagaaaggatccaatctataaacactttcttctatatgacaatgaacaatctagggatagctaataaggtgagattacaccttatatattccaatcaatggaagaatataactacaattgaactacagaattcaaataataccataacgtatatacttcatggtgaaaatccaaataatgtaaagcaatacgtactagctataaataaaacacacaaagttacagttgaagatatggataaattgtttaagaaaattgaaagtaatcaaggtatagaattagagaagatattaatggggataattgatactgatggtagtattttattttattatgtacataaaggtgttaaaaattttagtgattaataagtgtaatagctatactatataaaggatgagatgaatgatttaaaagcattggaaaatgttaaatgagatggattgtatgactttggtaatgatttagtgttgaggtattcaggataatctctttcaagggttatttttatgaaattatctgataattcatcaataatattattttgaagatatgaattgataattaatgataaaaattcactattagaagttgataatttttctttaagttgattgaaattatcaattgttgatttaagtagcttaatacaattaagattagcaataattgacttttttttattaattaattgtaaattattatcaatttgatttttctgtaaatcatttataacaggagtttcaactaaatgtttctcttcatcatctaatgttgaattcccatcattttctccatcaattatacctaaattcatacaattttcaattccattttcacgtatttgtaatggtggtaaatattgaaatggccaaggtaagtaatttttaaatgctggacgtgtaaatgattcataattagttgtattaacaaaataattgtatgtagttataatattaaagtttttaataatactatgtaataatgaatcaaataataatctttcagtggaatcattgttatcattaggtgataaataattccaaatattaattaatccagttatttgttcatcattagttattaaacatggtagtttttgtgaatttgatataaaataattggaatttggtattatttgaatatcatcaatatcattaattaattgtgatagtattatagattctatgtcaaaaggagatatctctttaccattaccccaagtgtaaatattcatcatcttgcttaaagaaaaagaaaccggtgttgaaattacatgttatgttataatttgacatgtcgagaaattatcttgggttcttttcttgtgattctttttctttttggtaaagaaaatgtcagttgataaacgagaagcagaggatggtgttgagagggaagatattaagagagtgaagagtgaagaagttgaagaagttaaggaagagatcaaagagaaggaggaagagattaagacaaattacacatatggagaatggaatagtgtattaacaactgcagttattgaaggtaatgaaaataaaataactaaattatttgatacttatttatcacaatatgttaatgatggagataaatggacaatgtatattgaatggatgatgaataaggaagttgatggagataaattagataagaaacgtattgagagttcattttttaaaatattaacaaaaatttataatgttgaattatggagattatatttaaaatatgttgaaaaagttaatccaattacagctggtaatgcagaaaatgcaagaaatattgttttaaaggcatatcaattttctattgaaattgttggacaagatttttttgaaagttataatatttggtcagattatttaagatatttatatatttggcaacctgttacacctaatgaagagaaaactaaaatggaattaattagatcatcattaaagaggatgattagttatccaagtattaaattagaggataattggaaaatatttgttaaatttgaggaagatttagatttaaatcaatcaaggaaaataattaatgaaaatattaaagaatatttaaaattaaaggaaattaatgatgaattgatggaaattactaaaagtataagtaaattaaaagataggaaatatagtattagacaaattcgtagatggaataaatggattgaatgggagaaaaaaaatttaatgaataaaaatgaagttgaattaaagaagagaattaattatgtttataatttaagtattcaatattgtaatataatacctgaaatttggtataattattatgaatatttgaaaaatgaggaagatattgataaaagtaatgaaattttaaatgatggattaaaagttaatccaattagtttaatcttaacaaatgaagttagtaatgaatatgagataaagggtgatattgagaaaattaaagaaatttggattaaattgattaagaatattgaagaggatgaagatagtttccaaaataaaaatgagataataacatattgttattgtagattaatgaaaattattaatagaattaggtgatataaagaagttagaataatttttaaatg

SEQ ID NO: 9 - DNA, 135097 bp, Pichia kluyveri
  >Nicaragua_Y298_000007F_chromosome
ctataccccccctgcgacctacttcactataccccccctgcgacctacttcactataccccccctgcgacctacttcactataccccccctgcgacctacttcactataccccccctgcgacctacttcactataccccccctgcgacctacttcactataccccccctgcgacctacttcactataccccccctgcgacctacttcactataccccccctgcgacctacttcacttcactataccccccctgcgacctacttcactataccccccctgcgacctacttcactatacccccctgcgacctacttcactacttcactacttcactacttcactacttcacacatctacttcactacttcacttcactataccccccctgcgacctacttcacatacttcactataccccccctgcgacctacttcacatacttcactataccccccctgcgacctacttcactatacccccctgcgacctacttcactacttcactacttcactacttcactacttcacacatctacttcactacttcacttcactataccccccctgcgacctacttcactacttcactataccccccctgcgacctacttcactataccccccctgcgacccacttcactatacccccctgcgacctacttcactataccccccctgcgacctacttcactataccccccctgcgacctacttcactataccccccctgcgacctacttcactacttcactataccccccctacttcactatacccccctgcgacctacttcactataccccccctgcgacctacttcactacttcactataccccccctgcgacctacttcactataccccccccccaacgagtgtttcaactgaatcaaacgaatgtgtggctgatatgttgtctaagttgccatattaattttacaaaaatagaaattgaaataactttatcaattttaaatcttttactaaagagtttaataagttttaataaatagcatctactaatgcaacatcaacttagtctgaaatcaaaatcattgaaacaactactaaaaggttaattagaaaaaccacctttactcaactttaaaatgcaataactcaagaactagaaaagcaattgactaataagctactaatacagaatggcaagacagagaagaaccattaatgactttacaagaacaaaataccattaactagtgtgtaattaatgtataatctgtactactactgtgtaactaataaatctacaatcccactactactactaataatccctaccaaaaacacgattacgtaaccctttgctaagaaaaaaaaccgaatcctgaaaaaaaccgaatccctatgtaaaaaaaaaccgaatttcaaaaccggatccctcaccctaacaaaaaaaaattccaattttccaaaattcggtccgttttcttagcgttttggaaaattacaaaataggtgaaataatcatcaccatcaattaaaaacttggagcacattatttccctttttttcatcaagtatttgaagtttggcatcatatcttcttgttcttgttccaagttgaatggcatgtgtgcttttttaaacataattgcatatctttctctatttttcctatcaagacggctccatttgttagcaacaaaatgtcttgttaaattcatcattagttgtttaggatcagtgttcttttctttttcactgaaaaattcttcacaatcagctttagtgaatgattctgtaaagtaatccctcatcataatattccaaagattcatgtcctggcattctaaagcaagttcatctatagcaatcgctaggctttttaatttttgaaggttttcttctgtaaacatagttatatcattacccacctcagttgtattgttcatttcatttgttagaccttgatttgctaattctatattctctcttttttgttcttcacttaaagcctctctatcattatagtattcgtcttcaatgtcagataaatcactcattgagacatctgagttgttgttgttggtaatatgtggattcattttaccgttttgtactataattatgttattcaaatatataaccagtatatagtactactaaactagaacagttcattaatatatagaagagaaagaagaagaagaagaagaagaagaagagagtggtgaagtagtatgttaatactacttaataatgaaatagattatgtaagcataaaatgtattatgtaagcatgaaaaaaaccgcacttatacgtaaaaacctttaatgtttaaaattgtaacgtttaaaatgttccccctgaaaaaataaaaaataaatacttcgcactactaaaatttccattcggttgaaaaaaaacgagaaggtcctgtaaaaaaaaaccgaatgtcaaaacgagatggcccgcgctagaaaaacaaaaatcataactacggccattccgtccgttttcttagtgttttctattatacactatatggtgaactgcgcgacagagtaaattttctgaacaggtttaggaaaaaatataattatattaaaaccacgcgacattctaaaattttatcatatacaacacaaatatatgtcataaaacatacttatacacaatactgtccgaattaggagatattaatgctaattcaattaatttattaataatatgattaaatacataccttatctcatgtattgaaacataaaatatattgttatcagtcattaaaagaaagaaaatacaaattattaaattttctaatttttttataaacttttcatagaatattttaaatattatcaacctttctacaaactctgagtacattttaataaaataaaataaaaacgttaagaaatgagcaaacaacagttaaaaaggagcaatagacatcaaaatttatcatactggttgagattgttgagattggtaattctgagtgagactgaataataaattataatattgtattattaagttgaacctcgaagaaccaatcaaaatttagtattgctcgcaaatcaaaaaaagaaattattagtcaacgttggaattcttagtataagtaccacgaagacttccaaggtttgttaatatatcttttatgttgttattgtatatactttaacttaattttatatattatatagtttgttcttttaataactgttgctgtcataaatatggatcctgcccaaagagtcgttagattacaacaatactaattatttcatactactcataaaattctacataaaaaaccatagaaataatgaaatatctttagtaaagttgtaatcttctactaatatctacttctaggaccaaccaatccttcgtctatataataactataaatactatgttatatcaaacaatatatgtttataatccatgaactacataacttttatataaatacatacacctatactggatttaaattttatatattgttctaacttaatattcagtgcattttttacttacactatcattttcttataatgcttaactgtataaattcaaaatatttctagtttataattatctatgtttgaacttaaatgtcaacattcctatggctcagctgtttatctacctaatatttctttttttaaaatcaaattaaaagaactatctcctaaaacatagatcataattaaggtaagttaatatttactttataacttctcttatacaataaaataaaacagttatataacgatctatgcaacattatttatgttttttataaataatgatactgtttctccaaatttatcatgtattattaatgaaaatgttaatattttgaaagaacgttgtttggttaatattaactaattaatttagtacacgtccttaaaacaaagtattttgtatttcaacttttattaagcaatccatctctttaatataccaacccctggctctaaataatatgaaattttgttttggtaactatataactttgtgataaatatgtacacccattctaattttatatatccttacataataataaaacaatagttataccaaagcaaccataagttacatgaaatcaaactgaatgctcggctaattaggtataacaaggatttcggctaaagatgattaattttatgcgaggaaattcaaaatttcaaaacttatccgaatattcagaatagccgagacctctggaatttccaaattaaaaaatacaattttagccgaaacagcaatggttttttcaaaatgtttttgtctaaacaaaataaggtgctattagttatgttggttaatactgaataattaataactaattttaattgttaaacgtatactttattaagattggatattattctgattggtcaagtattatattctaagaaactgctaaatagtatttaatatttatacgtagtttaaccatcgattttagttatattatttttcgataatgactctcttaaagccttttcttcttcctctactgactgtgataatatattgtgataattcaccagtagttaaaacaaaaagagaggaacatgcttaaatacaatataggtttattataaaaatattaattgctgtaatattaaattaatctgatttagtataagattaaaataaagtcaaatgctaagtaaattaaattcactgacatttctctaacccaattaactgatttagcattagataaaaattaaaatattttatatgaataagtggtaataaaacaattacaaataaaatgattacaaatggtgttttcattacattaaacgaagcacgggaaaattttaatgataaatagattaatttatattatactaaactaattataaaggcataatatttggaattggacctaaaggtgtaattccatgtggattaatttctggatgggactttgtataatgaaatttaatatgttcaaagttagttgtatccttaaaagcattattattccaatataattcttttaaatattgattaatatttggataatcatgtctaatcattttaatattacatttaaaatgttgatgataaacaggatcaaatctaattaatgttgtaaataatctaatatctgcttcattgattaaattgcctaataagaatttttcaccattattatgtctctcttttaataaatcttctaatttatctaaatatttgaaaacatttttaacttctctttcatatggttcttgctttgttgcaaaacctgatttatagacaccattattaatatttggataaatccaatcatttaattcatcaatttgattttttaaactttcaggataaatatcaattttagcaaatttttcatcaataattgaattaaattcagtatttaacattctaataatttcagaactttcattattaacaattgtctctaatttcttatcccataaaactggaactgtaaatctaccttgataatttgaatttgccttaaaatataattctttaattcttttgaaattatataaaggatcaggagttgaatcaattgcatcagttaaaccttcttcctttgttgcaaatctccaaccattattatccatatgccaatgaactacagtaactccgattatatttgttaaaccttttaaaatacgtgtaattaaggtacgatgagcccaaggacatgcatatgagacatataaatgatatctattaggttcaggtttaaatttaccattaattgaaattgtgtctctaaatgatgataccaatctcttgtattcaccatcttcattagcaaatttttgaattacaatcttatctgtcattataatatgttatattatattaatatgtgtatgtgttgtattaattactcaattgtaagtgttgagtattctaaaggcaattgtaagcaattataagtacaaattgcaggtatttatataagaaaagggaagtgaagaaggggaagtgtaataaattgttagtaattatattaataatctcattaataagctttattatcactttaatcatttgaagctttcttttgtggagtatatcagttatttcatatgagtttatatatatgtaagtagttcttcttatatagattcttatatagatatagagaaatcatactttactaaggttaaatatgattgtagaagtttaaactaacttatatagtcaaataaataaatatctttcagcttctgcaatagctgaattatctaaattatattcatgtaacatttctttaatattatttaaattgttatcaggtgaaaatcacttattagaatatgtcagattcagtattttgatattattaataagtcttgatataactaaaactctttcaatttcgaagaatgtttagattgatccgatttaactgtttaactagatatactatgtgtatattgttgttattattaataattgacacattatcaaattcttaattcatttaaataaagaaatttaatcatttatattccattagtaataactgtatcatactctataattaaatatcatattcaaatattgttctattttctagtttgaactcattaataaactaacataaccttcaatgatttatacttcaattatttctaattttcctaatcaatgaatatatcagttgcaattgaaattgacattaactaaaatatgatattacattattatgataattcttaactgttctaataatatcctattaattccattattattatactcattcaaatcatatcatcaaaaccttaaatcaatatcaccattatttacacttcattacacttaattatgaatgtatttaaccagttgttaataaaagaaccaatatccactaagaagaaaactctgacaattaacatgttgaaaatatttactatgtgagggaagttctcttaataaatttgatggtttattaacaactctttctttatggttatatctttaaatggtaacataatgcaatatgatgttgtttgtacactgttggttttgattatgtgaagaaaaaggaacacccatatggaatattcaacggttactaaatatttaataatagttaccaaataaactgcattcgattgaagttatatcaaacttcttgaaatactgaaatagtaatgcttaattaatagtatatgttttgggtaaaaggtttatgaaaacgaaacatcatgtttataatcaaaagtttaataatcaattgatttaactattctattactaattcaactaaaagagaacaattctgattatattttcaacattgaccaaactgacttgtactacaataatgaaatattaatgttaatttgaaatatcaaatagccaactatttacataaatagtatttgtcgatataaataataatttttttatgttatcataatcatttgaatataatatgcatataaagacttttgaagaatttataatacatcttaatatcacaaatacattacatgatcaaattataccccaatatcatcaggctttaatacatttaaggtaatattgttaagtatgataattgaagtctcaaatttgtaaatttcatattccaattacaaaatgtaaatagatttattcagattattacaattattataaaaatgatatcaattgtaattacaataaagatggtaaatattaaacattcaataaaaatatttaaaatatttagttagaacaaccttccacacaatcataataatcattacattgaccatcaacaccaccatatgtatttgtgtaaatttcaccatgaactgcaacttcgatattttccaaatgattagaatcaattggttcaccaggagaaggatcaatattcatatctaaacaccatttccaaccatcattgcttgaaatgaaactttgtgcactgtctgcccaaacttgagtttcatctgaaccttgtgtatccacaaattgttgagctaaattttcattaacattatcataattatatgaaacccaatcaacttgataacctcttttcaaaagacgaaatttaagagaaacatcaggttcacctggaattgctttatccaatctatcaacaaattcagcactagataaatgaggtaatgaaacagctaaatgatgacctaaatgtgtatcaaattttgcaacggtaacatttgaatttaaaattgattcacttcttttatctaattttgaaccaatattaagatcattataggtacctaaaagtaaagttaaatttttaataattggatgtgaagtaattgaatgatcagaataatcagatgtaacattttgcattgattcagttattggaataatatttgaaccatcacttcttttagtattaccattagttgcacctgaactatcacctaaagctgctaaagttgctgcattgaaagcaatagccatagcaacagaaatccaacatactgctacagttgcagaacaaactgcagctgccacacccatccatccagcagacatacccattaaaactgttgcattaccttgtctgaagatattactaacagaaaatgcagtaacttttgtaacactgtataataaaattgaaataaaaacgattttaactttatccaacttaaacatttttgttgttgttgattctaataaagttttaatgttataatattataatattataaaatataaactatattttttgctttcaaaacttcaaggggaagaatacagttatttatatagttttcctgacttatgatcacagacataaccatatatcggttaacttacaaaacaaatgtatactagcaaaatatagttattaataattagcaatcatattttcaacttaaactttgtaaactttgtaaactttgtaaacatggtacgattactttatttgtatttatagtatctgcatcactatcgtgatacaaaagcaagaaaccttaatgaaaatgaaacaaaaatgaacaaatagctaagataaggttttaaaatgaaagcaaatgcggtaacaccttttccactgcgaaatttctgatgatcattgacttatctcttcttcacttcttcttcacttcttcttcacttcttctccacttgttcttcatctaatcactgttacaacaatggaacttactcaacagaacaaatcaatcctcaatgctgctttagtattggcttttggaactatattatcaattattatcctaaaatttggatcctatacaccttttttacaacctgcaaatgctaaagttcttatgcaacttctatttatatggttaattattacaatttttttggttagaattatgacttccattccagaatatattaaatatatcccacttactattagtatgctgataagtatttctgccgttattattcttggctttgaaaatgatgtacacaatgattaaaaaattgataattaattaacattcccaattgttaaacttgacaaatttagattttgtatccatattattaacaatcaactcaactttctctttcatttcttaattatggtcctttatagtgttttttcttatcatataacactacattttgtatattattaaactatctgaattttaatatttaaaagtcaaatcataccctaactaaagattcttttttcatctatttctttcttctttattggattaattctatcaatggaatagcttcatttaaattttaatcaaggttttctcctaatgtattgaaagattttaagtttgatgtttcaatttattaatattgagagaaagttaaatcaatttaaattaaggactttatttgtttaatcttttgtctttatcactgttaataaactcttttttcactcttaaaagattgttttatattcccttttatataaaacttggacaatcatgtcatatggtacttattttgcttatctaactataacctaaatatttatttttgattatgtctttaattctaaccatactcaatcaaatttaaaccttttaaaccctaaaatgatttgttaaacaatttgtaataatagctaaccaaaaaatatttaatatttgaaaaacaactctctctttcttatattcaccaaaatcactattttgaaagaaaatttttaactttttttcagcaagatttttgcttgatatttttaattaagcctaataaatagatgattctctatagatatctactgtagaaacggctgatttcactgatttttacctaattttgcgtggatcacgtgaaaatgtattgtgcagaatgtcctgaggggttaaaaaccaactgaatggggctatggctcaatggtagagctttcgactccaaatcgaaaggttgcaggttcgattcctgttggcctcaattcaaattatttttttacattttattcataaataagataagtttaattgatctattctaatcaactaacttcaattaaatagttactttgtttttgatgaatgaatattaaatttgttttttttacacatttttcaaactagtttctgttttagataaatcaatatcatctattttattaataatttgaatttgatcaaaatctattgccaattccttagatttattcaaatatttttctgaaagtttagtatcatttaattgtaaatatgtaacacctaaggaataataagtaataggtaaaattggatttttaataccaacactggaaattaattttaaataaatatcaatagccttttcataatataatttattatttgatttttgacctaattgaaaccatgaagaaccaatatttaaaatttgtgtttcacctgaaactgtattattaaatcccgatattgcagtccatagaaagttactttgtaatattgttaaactatctgatattctacctaaattcatcaatgtcattgcataaaaatctcttaattttaaatatgattcaatccaagctggccatactttatcttggaaagttctagttaattcccaacaatttataaaatctttagcctcctctgattcaatattatcttcaatccattttgttctatccttatttatatcaagtagtccattatttcttttagaccaaatatctattaattctaatatattaacttttttattattcgttgcagcccatggtaatcttttcggtatttcataattttcaatataatcaactctatcacgtaattcttcaataacttttgatgaactatttggatccttataagataatttcagcattgcccatcttgtaattacaattagatctctatcaattaataaatctctctctggattttcataatctatcttattacgaattaaattctcaaatatgaatgtacttaaattgtagtaagttaacagtaattgctctttcatatctaacttttcatacatttcaccaattttcaatacaattccagtatattttaaactcaattgatccattccttcatccttagctgtatttaaacctttttgataattctttaaagcttttaaatattgatcatttccatctctttcttcccataaacctttccttaaatctttactgacattagtagaatatggattccatggttgccatagatacatcgttactgaacctgcaactagaataaatgtaccatatcgtacatatttacctatccttttatttcttttcttatccctattgaatttctcatgttccttaatagctctctcacttggtgggatatacttgttgactttcttgatattctgtaaaaggatgttggttcttttcaacattatatatgagtaattgatagatgtaataagagttgcagaaatcctagaaagaagaaacgtaaagtcatatatcaatctctaatttaacatgaaaaattcatgaaaagtgaaaatatcatcaaattctccatttgattcatgttgatctttggagttttcttaggatatcaatgttcatttggatctgatttacatgtgtctatatgatgttgatctatttgttgtcatacactagttttatatatgaggttaataaggtaagatatatacgatgatttcaatattgaattaaataggacttattaattatacaaaaatatttctattaatcttgtatagaataaaagaatctgttctgattgacattaatagaatatattagaataaatttaaattaaaccgaaaagatgtcgaacaatttaaacgaagattcaaatgatcatattgaagataacgatatcgtcatgaatgataaaacaaggcatatgcatgaagttatgatagatgttacttaccagttgatccggcatgttcggattcctagcacctaaatctatacttcataaattccgtcccagagatcctaacatggggggtcaacggggaagtagccataactttcaactttagtatctttgcacagcaagcgttcatggttatcagaagatcattatctcaaacaaacatcaaatggtgtggtttcttagaaaatgcaatttgttcaatcatcaaaagatcattatctccaaaggtacgtgaacatgtcgagaaggtatgcgttggtccaatggatacatcggtaatgtatttgtgtgaagccataaaatttttagatattatagttgatccacgtagactatatgctactgtcatggatatcaaattagaaaaccatgattacttaaaattttaccaagaactgaaacgagttgatatgacggcaaggttattaaagatcaacccaaatgcacaaaaatttcatattgatataattgaaaataatatgtcaaaacttccaacagatttgacaatcaaattagaagaacaaactctaacctttgaatttttttaaaagtatataggtattaggcctagatctatcgaacattatgaaatgcttaatgtaaatgtaaaaactaatcttgaaaccaattaaataattcaatattgtaattttactgttgattatcaatagtgcaaactaacagctttgccacctatatcacaccaacagggactccccatcgaagtgaagcacaccaaaagagaagctcagaagaaccaaaagaagaagagaaagtggcaaaaagttgaaaaactttgaaaactgaaaattttcatccttttcaaattgaaacttcgttttattacgtaatttttgagatgaggagagagatgttaattaactgctatacttatacatcttatcttatcttaattttattctacatcgacaatatggacactattagaggtaaatacgacgtggttactgcatcatttgtatcacaaccaagatctagggaagaatctaaagctttattaagaaaatttagagataacctgaaatcatcatttgatgaattatcaaatgctgttagggaagattttaataaacctgaattagaattttatgttgcagaatatgcacctgcaattggtgaattaactaatattttaaataatttagatacaattttatcatcatctaaaaagtctaattcaataccaataacattttcaactttatcaacagaaattgaaaaatctccattaggtacaattttaatcatttctccatttaattatccacttattttagcagtttctccattaattggtgcaattgcatctggtaataatgttgttttgaaattaccttatgatcaattaccaaatttctcaaatgctttaaaattagttattgataattcattccctcaagatcaagttttagtagttaatggtggtattgaagaatctcaattcctcttaaatgattgtaaatttgataaaatctttttcactggttcaactaatgttggtaagattgtttataaggcagcagctgaaaaattaacacctgttgttcttgaattaggtggtaaatcccctgttttcatctcaaagaatattgatatatcatcattggaaaaattattgaaacgtttattatggggtaaattcacaaatgcaggtcaaacttgtgttgctcctgattatttattaattgattcatcagtctatgataaagttttaaatattatctttaaaattttcaaatcagattttgcaaatgttaataaatcagatgaattctctcatattgttaatgaaagaggttttaatagattatctcaaatcttacaagaaactaaaggtgatattttatcaggtgataataaatcagataaagattcattattcttctctccaactattgtatctaatattgattggaatgatagtttaatgcaatctgaaatattcggtccaattttaccaattatgaaatataattcatcattaactgatatcgttaaaaaagttgcttcaattcatgatactccattagctgcttatttattctcatcaaatgataatgatttgaagatcttacaaaaatatttaagatctggtggtattgtagttaatgatgctttatggactgcaggttgttttataactccattcggtggtataggtactagtgggtttggtaattatcattctaaatggacaattgatactttcactcatgaaagagccgttttaaagcaacctttatgggcagaatctttaattagttcaagatatttcccttatacaaaggaaaacttaaaagctttaaaattagtttcatcattacctgaaataccaattgcaactttaaagaatttggcataccttctatccatctttgttattggtttcttccttggtaaatacttctcataaacttgaagggctacatttatttgttattgtctttttattatgtattaagagtcctttataaaaaattatttagttattgttacttttccttttatacattaaatgcgtatcattatgattattattataatatcacgtcaatcgaaataatacccacctgcaataaaacgaatcatgtattcatcaatatgaccaattgaatcatcatcgtcttcatattcttcttcttcttcttcatttccattttcatcaccgtttccatttccatttccattttgttcaacatcttcatttgaatataaatgtttatgtttttctctttctgcaatacgaactgcaagtgcttcagcttcagctgcctcttctccttctttattatttgaatttgaaattgcatttccattattattaccatttccttccttcttattaccatttgccttttcatcatctgagaaatcttcaacatcagcttcaagttcatttaatgcaacttcagcagctttggcatcatcttcatcttctgccatctctaatgctttggtaaattcagaactagtcatttctttctcttcattcataacttcagttgatgatttacctaataattcttgaactgaaactttattaaaataatctgttgtaaaatcaccttcttgaataacaacatcatctaaatatttcttttgttctgccttctttaaaatatttgcttcaattgtatactcagaaacaaacctataaatatgaacatctctagtttgaccaattctatgacatctatcttgacattgtttatcaattgcaggattccaatctgaatcatagaaaataacagtatctgcacctgttaaattaatacctaaaccacctgctcttgtacttaaaatgaaacatttaacacgtgtatcattattaaaactttcagttaataattgacgatcttcaattttagttgcaccatctaatctcatataagtataaccacgataatttaaaaataattccaatatatctaaaactttcgacatttgtgtgaaaattaaaactcgatgaccttgagggattaattcagataataatgttgcaagtttttgtaatttaccacaatcatattgtaataatgatttatcagggaatgcgatagatgagctaacttgaatttgatgaaatggattttcaattatatcattttgtgaatcatacattaaattttctttcagttcatctggaaacattaagttagtaaagttagtacaaactgccttaggagtgacaaatgcatattcttttataacaaatttagaatctgatgcaatatcagagacagatttcatcagttttaattcttgaagttgattagttaatacttttggtttcctcattgataacatgttaattaaacttggagatataacacacgatttatcacaattataatcatttatatattttttatgtgacatttcatttaacaagttaatattttcttcatttagcaaatattcataataaagttctaaatcattgaagttgggtataagtgatttatcctttatttccttttctaattcctgaattttttgtaaaaatatttttgatgcacttaatctattaattgtttcataatggtaagaattcatgttttctgaacaattggaaatattattcatatttaaaaatgataaatcaactttttcaatttcgtttgttttcattaattgattaacctttaggaaattagattcaaaatttgatataattgatttctcttgtgaaaaacttgttaaaattggtctaacttcaaataaatcaggatgattacaaactttccttaattgcattaaacagttgataatactcaaaaaattgccacttgcaagtgtttcctttgtttgtgctctactcataaaatcatcatataataatctttgacgttttgataacctacaataaacaatatgttcatattttgcaggcatttgcttttcaacatctttctttaaacgacgtaataaataaggtcttaaaacttgatgtaatttatgaacagtttcctttgtttcattatctttaccaccttgttgaataattttatcaaccggtttaccaaaccattgttggaaatccattaaatctgcaaaaccttcaggcattgtaacatcaccctctcttgaagttggcattaaaaaataaagtaatgaccataattccataatattattttgaagtggagtaccagttaataaaattctattttcagtattaaaatttaataaagctttccatctttgagatttaaaatttttaatattatgagcttcatctaaaatcatatacttccatttttttcttctaaaaattggttgatcatgaacaactaattgatatgaagttatacaaatatgaaatgaatcaggggtattccaacctttacgtttttctttacgttgttgaggtgaaccataataagttaaaactttaaaaccaggagcaaatcttttaaattccatttcccaatttaacatgacagatgttggaacaacaattaaatgaggaccccaaatatttttttcacaagctaaatatgataataatgaaattgtttgaattgttttacccaaccccatttcatctgctaaaataccattagtaccattattataaagagatgctaaccaatttaaaccttgcttttgataaggacgtaaagtaccttttaataaaattggagttggaacatcgggtataccttgttcatcaagtaattctgttttttcaggtgatgatgaaggtgtttcatcattttgatttggttcactatatacagattcatcatcctcttcatcctcatcttcatcatttccttcatcatttcctgtattgaaaagtgaatgtaaaccaggtttattttcttcatcaattgaatagtcactttcattagatgataatgatgattcatcactatcagataaatcagaatcatcagatgaggaattactatcttcatctaataatggattagaattttcttctagtaatttgattctaacagattcatctaaattatcaacaatcgtaggtattttttcagaagtatcatctttatataacaatgaaagactcgaattattactattatcattggaatcagtaccattgatattaaagttttttaatttttcatatttctcctttaatttttcatctgataatttactatcatcatcaacaggtatattttcattttgatcaatactcatatgatcatcctcatctgaactacttgaagaaaaattatcactttcactgtgactttcactatcatcatcttcactattattttcactttgaattttttcaggttcaacacttgaattattatttgaagattttgtaatcatttgagcacctaaaactttagtactatgatctaaaattttagataattgttcctttgattttttcaatcttaaatgttcattttatctttcttctaaaactttataagctttaacagcaatattccatttctttttaacttctttagctgtgtctcttgccaatctataaattttcttttgaaattctttttcctttttatcattttcttgagataatcttttaaaatgaacttcaatcatttgagcaattcttttacatttttgaattttatttgatcttaaatcacgaattaattttgaagattttaaaccttgagcaattaaatgatcataatgagataattcatttttcattctaaatggattttcacttaatttataattatttatattataatctaaatttcttttaatcattgttggttctcttacaccattaggaacatttctaaagggattttcattataatcaatataaagtaattctttttcatttatagcatgatcaatagattttataagttcatgttgattttctaaatattcattaaatttatcagattcaatctcaggtgcaggatcttctattatatttctataagaatcaaataattgatttatattttcaaatttatgtacaggtttatgatcaggatgagatattattggaggtttaattgatattttaaatttaatctttggtagatgtattattttttgtttcttaattgtaggagtgtctctggtgttatttcgttcatgatttgaattatcatcatatttccttttattagaatcgatattattattatcatcaaaatctagcttttctgatatcctttgattaacaaatttatttaatttatttttcaatttaattaaattatcattatcattatttattaaacgacgtgtttgcctcttatttgattttggccaaatacttaaattattatcattttcataaattttaaaactttcactatccttatttaataatatattttcaggtgttggatcataacttaaaattgaatggaaattttgaagatgataaagttgatttgttaaaatatcagtttctgcaattaaatcaattaatttttcatcatttgaagataatgaatcattagacattattaaataatatgtcctctactagcaaatacccttcaatatgttctttttcaagtgaaagtgaagtaaaaagtaagagaaactataagaaaccatagtaaacctattgaaataaaatgaaatagatctacagagccgccataacagggcaacggggcaattcttttataaaaaaaatacttaccgacccatcgaccgccactctgtgcaccactgggaatttctctcactataataataatttcaagtttttctccaaacaacatgaatatctctctattaagatactctcccctcaatctctctatttaaaactctttcatttttgataacgaaacaatgtttactagatcaatacttaaacaatcaaacattggaattcaatcttttaaaagatttaattcaacttcaaaaaaatatggattaccaaaatttttacctgatccagaaattgaatttggtattaaaactccaaaaaattatattccaccacaatatagaaatcctcatttaaaatatgatgatcaacaaaatagagttaattttggtgaagaaattcatccttatcatgattatatggatatgtggtctcctgatcatttccaaagtgttaaagatcatgtagctgttagacaattaacaatttttttctcattattaggtttatttgcttatagtatttatattttagatatttggcctgaaagaccaaatatgccaagatcttatccttatgaaggtttatataaagatttaggtggtagagatggtgaacaatctttaatgcaagctagagttgataatggtaattaatttagtataatttaatacctctataccatcatattatcatatcattatatcatcatatcattatatcatattctctttattatttataaatactacactatacgactatttattattctatattaaattaaaaaaaaaatttattataaaatttatataactatatgattatatgactatatgactatatgactatacgctttgtatcatactatactatcataaagtaattgtttaacattaatctttcctattgattacgtaagtatatcatgagaattaatcatatagaaagataccatgaaacattaattatgtacaataaattattataataattcaaataaaactaaactaaattaaactatataagaaattaaaaaattaaagttaaccttattaacaaaattaacaccagaatttataaattctataatagaaaggttttgaagcaataaaagctttttcttctgcaatttcttgttttaataattctaaatcaacttctcttctacctgtatcaatatctaaatcacctgcaagaatgaataatctaaaatctttcttatagaataaccaaaataaataacaaacaattaaaattggaacacaaaggaaaacttggaaaaatgatgatgcatttgcactttcaccaattgggaataatgcaacccaaaattgtgccattaaaattaaacaatttaataaaacaccaaaaattgaaccaattacacctgattgtgctttaaatggtaattcatcagtacctctacctttagcctttaatgcagctctaaatcttaaatgacatgcacaaattgaaccccaagtaaaaattgatgataaacctgataatgctaacatccaatcgaaaacatcagcttgatgttttgaagctgctaagaaacaaagtaatccaataaataatgaaattgcaacaccaactaatggtctaccttctctatcaatataaccacaaattcttggtgcaaaaccttgatctgctaatgaagcaacagttcttgaagctccataaactgatgaattagcaacagaacaaactgcaatcataataactgcattcataactgatggtaaacctttaataccagcattttgaattgaaataacaaatggtgatgcagctgcacctgaattacctaataatcttggatcagtataaggaacattaacaccaactaatgtaagtgaaataatataaaataatgcaattctccaaaaaacttgctttgttgcagaaggtaaagattttcttggattttcagtttcagcagctgctaaaccaactaattcagtacctgcaaatgagaaagcagatgtaacgaaaactgcacaaacacctttaaaaccagctgcaaatgcaccaggattatgccaatattgaccaccaatataaccaccttttggaccaccaccacaattaataacaatacctaaaataatataaccaagaattgctaaaacttttaaaaatgaaaataaaaattcagcttcaccataacctttaacaccgaaaatattaataaataaaactaaaacataaaagataacaacccaagcagcagaattaatttcatcattccaataatcaattgtaattgcagcagcaactaattctaaaggtaaaacaactaaccattgtaaagcataattccaagccatacagaaaccccaagcaggtgaaataaatctagtattaaattgaacaaatgaaccagcaactgggaaagcaacacataattcacctaaagcttgaactgtacaatacatcatagcaccagttaaaatccaagcaataactaaagcagctggaccaccagttgctaaagcagaacctgcaccaacgaataaaccagtaccaattgaaccaccaattgcaatcatttgtaaatgtctattttttaaacctctctttaatggagattttgcagcaattaaattagctctttcaacatcagttaaatttggatcaatttcacctaaatctaaaggtttaaaaccatcaacaaaatttctccaccaaccattattattattttcatattgagcataagggtcaacataaccaccatcattattagcatttgaaattgaagaagtttctttattataatcgattggagatacattagtatcaactatatctttttcttcataagttttttcaatagacataatgaaagaagattttttttttgtttaaaggaaacagaagaaaaaaaaaaggaaagaacaaagaataatagaatgaaataagatgggaaaggtttgaatttatataataatcagaaattaaattaaattatattaaattatattaaattaaattaaatggacagttatcagataagagataaactgggcagaaacagaacaaatggataagattaattaaacggtgctattcaagacattaaagattagattaagttacgatgggcagaaatagaaatcgtaataccgtttgatgatcaaacagataattatcatcatcatcatcatcatcatcatcatcatcatcattattattattattatcatctactcaaattttcttatcagttagtaatgcctcacttaaaattttcttatcgcttattatcttattttcttattgtttcattctctatggcatttaacgttggttaattgattattattattgattattattatttattattatttaagatcttattatattctatctaatgccatttcatttatatggcattacgttaataggagttattattattattatttaatattattttaaattatttacatgatcttatttaattatactagtctatacattacgtaatcaccatcattttaatacattatcagtatcaataatccattcatcattttcaccatctcttataatcataccttgatcttgtaaattcttaaacatatcctgtggaacccatccattggttgcaataaatggtttactactattctcaatttcatatttcttaatctcattagtaaattcctcaatttcaacttcattaaatttaattaaattattttctccaattttatttcctaaaataccattattattataattctcccacatggtggaaatttcaattaatccattctcaatataaagataatctttaatctctttaaaatttaataaattaatatatggatttttaactaatttaataactggtgaaataactccaactaattctttacttctcttattaataccaacttcccataaaaattgatttctagttctcttaaacataaatttatattgttccttttcaacatcatccaaattttcaaaatcttcaatttcttcatttaaactgaaaattttacctccattatattcaataaatttaggataattactaattaagaatggtttaataatacaattctcaaaatcaataaattgatatcctttatcttctttcctaataagaacattcattggatctaaatctccaatttgtaatcttggcttaattaattcttccatatttggaattaatgtctcttcagcgttaagattgaaaatttcaccagaaattttattcattttctctaaaacatgcttagccatcaataaatcttccttcttttccttaatttccttattaccattttctaataattctaatttcttacctaagtttaaaatctctaactcatttaaatctttaatcatctttaatggttcatctcccttccatggacctgcaaatttattaatttcttcatcacttaaatattccttatttctataataagcagtttcaacacttggcccaataacccatctatcttgattttcaaatgctgttaacccatttggacaatcatctttaaaataaattgaaccaaaatttttaaatataaaatcaccaacaattttattaaaatctgccaatggttcaataacttcatttaatttttcaattgcaattggatcatctaatttattattttcactatcaattaatggattccatttcttcattaatgaacattcaacatcttcaacatattccattaaaataaattcatgacctaatggattttcacttgtactactatatgataaaactttaggaatatttaaatttaacatattatttaaaaaatccattgttgcaacttcactttcaatctttctcttagtgaaaagtttagaatgtaatgtatatggtaatcttaaaattaatttcttatcagtattatccatttcaattctataaactctatgatgtttaccttcatgtaatgaaacaatttgtttaatagtaccaacttctttaatatccttgaaaaaatttggaatattattaagtaaaattttacaattttgaatatccttaatagcatcaggattactctcttctgataatttattactaactttaacattttgacatctactaattaaatcatttaatccttgaattgaaaatttagtaaatcttttacttttctcaagagtatcattctttaaccatgtaccccaagaatattgaaacatatgttctctatttggatcagcatcatctaataaattagttgatgaaactttacccttgtcagaaattgttgattgaaatctaatattgttgataatagttctagaaccaccaacaacactaactctgttagcagtcttcaataaagaagcagtgtttctcaataaatgtctcttacctacagctgaaagcatggtctgtatctctatctaaatctatatccttcaaaagaaagactgttctccaatagttataactttaaattgtcgacgacccagtgaaaaattcatgttaaacaaagtccgcgtaaattttcattatgtaattactttactatatggaggctcattcttttctttctttcacttcttcttttgcttcttttgcttcttttgccacagctcactgtagataaccatgagtcaagtagtaaaatgtaaaacaagagtctcagatagattcacccagtctcagagtgaaagaacaattcttgagattttgagaatgtcaatttcatgtatttcattcttacgtggatttttcaatgatgagcattttgaagataatgtgtttcaaattaataataataataataataataaagtaaataatagtaataatactaatacaaaaagtgataaaattaaaattaaaaatctaaagaaaggtgtatctgatgaatgtgatataattaatgattggattgatatttcaattaagaattcaattcatgataaatatttaaaggcaattaatttatcagttatcacagataaggaaaatccaactgatatatttgaatcatatattttcaatattgattatttaacaacttcagttcaatcaatttcatttaatggtaatataactttaactcctggtgaattaactaaaattcaaattttcagtttaatgaaaaaaattatcttattaacacaatctttatcaccattaccaaataaaagatatttatcaatgagattattatataatgataaatgtccattagattattatactgaaaattttattgattgttcaaatgagaaaccttcaatgattaaattacctgaaaatttaattgatgatttatatattcaatgtggtgaaattaattctgttcatcatgaattatcaacttgtcttatctcaaaatcaaatatgtcaagggaagattatgaaaattcaaatttaatatcaattgatccttttgatttaattgaaagtaataatagtaataacaactcaattgataataacgacacccctaataatgatatgaaattaataacatataataattcacaagtttcacaagttaccaaagaattatacaatgtaatgtcaaattttgatactactattcatgatggacaaactcaaattatggattcaaattcacatgcccataatttaaatgataattatttaccaattttatgttcatgttcttcaaattcttatttatcatattcttcattaattcaatgtaaaaaatgtaaaaaatattcacatagagtttgttattcaattaattctaaagatagttcattcacttgttcaaattgttctaatatgaaaaatttaatttctaaaactgatttattaatattatttaatttaagaaaattaattgtcttcttccaaaataataaaactattgaacttagatcaatttcagatgcattgaataaattaggttatgaaacggataataaaagtattgttgaaacagttgttaatgcattttcaattctaattcataagaaaatcttagccatgaaaaatcataaatcttttaatcatacattattcaatgttgattttgatggtttaatgattgataatagaattgtctcaatgggtaaattttatattcgttttaattcaaatgcaattgatgaaattaatgaaatattaaatccaaaatttggttatgatcaacaagttaaggaaacacttacaaccatgagtcaattaaatgatgaaacaattttcgatgagtttgaagaattcaatttagctgataaaaataataattataaccaacttccaaataaaaaagttaaaaaatcaattgatatattcagagtttaaactaaaactttctaaatctttgctagacattaattgttattttataattgtataaaaatagtttataaagaaaattttaatttttttcaagaatattggataaatcactcattctaataattcccttaaacaatgaacctgtttctgtattcttacatacaaataaattaaatgtttgtaattggaacattaaatcatatgctgttagtaatgtaaaatcctcattaactataagtaaatcttctttatgtataatattagagtataagttcaatgtttcattatccatatcgaaatcaccattcttgaatgatactttggaataattatcaatattctccttcaacttcattaataaatcattataactaatccatccaattaaaactggtacatctttattttgtaaaatgacaaacccatcattaatagtttcattatcaacttgttcatcttgataaattaattcaatcttagtaatcaactcatctatgataattctatcatcatcaatatacaaaacaaaaggataataatcactccccagtatttgaaataatttcatttcagaaaattgggccattcttaatgtctcagtaagtcctggactaacataatttttatttaaattcattaaccataattcgaaaaatcccttagaatcaaaaatatcaagtatagtctttgcaacaacaactcctaacattaatggaatcatataagtaacagctccagtaatttcaaaaacaatgacaacagctgcaacacttgcattagttacacctgcaaaaaatgatgctgcaccaacaattgcatatgaacctggtgaaacacaattcttattctcattataacattgtaagaaaattccactgcctgatttttcttgaataaattgaacaaattctcctataaatctaccaattaatgcaccaatattaagagctggtaataagattccacctgggatgttcaatgtataggaataatttgattgaaagaataaaacaactaaatagatgaacatttcaaataatttatgagatgattgacaaactgcttgattgaaattcttatcaattttcttacaatcatagaacaaacttaaaagtaaattattcaatgtaagattactgaaacttattggatataacataattattgtcaaaacaactacaattgaaacttccaagttttgattttccaaaatagtatttaatattgggaatttagtgttgataagatcaatatttctaaattttatcttatctttataacttaaaataatcatatgtaatttcttaaatccaattgctaagaatccacaaacaaatccaacaaacatgtaaggtaaagtttcgaaaaatataaaactgttaccaatttccactataaatgtatcattaatttcaatttttttaaatggatgaactttgaaaaaaataaatgttgcaattgaagaacaaacaaacccattccagagtaatgaattaactcttgaacttaatcttaaaatttccacagaaaataataacccaccaattggagcaccaaatgctaaagaaatacccataacaaatccaattgaaataatttcccttctaattgcttcattttgtaaatttttaaacttaggagatatagttgcacttttatcaataatgtaattaataacaccacaagagatatgaatcaatgggccttcaaaacttaataggaatccacctgatgcacaaatgaaaatcaatgaaataaatttcctgtaaataatttcaggttttagaaaattattattaactctaccaaatattatcaactttaattcacttataccacttctagcgattgaataatcaaatttagatatccaagttccaattttagaataaactaaggcaaatattaataagattatcaaacctactattgatgaaaaacctttcggtatattatggttatagacataccaattatcaatacatgattcctcaacttgaaaaaaattccccctacaataaccatatttaagattacttaaccatgttaaagaccagtctaaaataatagctagtaaagatatcaatattgatgaaacgataagaattggccattgattatatttcgacagaagattagagaggtaagattttgttgaatattcatcagttggtgataatgatgatgctgacagtgagtcttccattcttttcctagagtataacttcctccagggtattatttggttatcgaaataagttctatcttgttcattatcgttaagattatccaatgaagagttgatattatcatcagcgtctatcttgtgagtatatttgtatgataatataggtaaagtacttggatgtgatataaagagatcctcctctgtcggatacaagttactcctattccttaccattgtctgtagaatgacaatcactccataagaaagaccttccaatgccaatcttacaaaaacgacttcactgatttgaaatattcatgtacgtaaaatacgcggtgtcccaaaacggcaaaagatcaacatgtttacttttcagtttgttgatcttttattaataattattttatctttatttatatattttattttatctttattttatctttattttattgtacgatcgagtcatctctttgctagtttactttctggttctcctttagtaatcataaaacatgctgagaactgtacgctcattaccttctctaagattgctatatcagcaagaagctaaaactttaattaacaatactccaaaaccggtattcaattcaacttatagtcatgtttctggggacttgttccatccaacaacatcaacatctacaacttttactagatctgttcatcaaactactaagaaggaaacaattttacttgattcatcttctaataaaactaaatttacttcaatgaatttacaaggattaaaggctgaatgtaagaaaagaggattgaaggtatcaggtcgtaaaattgatcttattcaaagattggtattagaggataatgcccaaagtatggaaaatgcaagatctttttctaatatagtatcatcatcatccaacgttgcatcatcatctcatttatcggctaaggattttattaaacctccaagtattttaaatcaaactaacgatattaaactaaatttccaacctaatgctagtaactctaaaataatgaatcaaaagaaagatatggaagttaagagacaacaagatgctagattacaacaaaagaaaaatttagaacttaaaatgaaggaagaattacaacttcaaaaagagaaggaattgatgaaacaaatgaaattaaaatctcaggaaagagaaattgctattaagaagcagcaagaactgaaattgaagttacaaaaagaattggagtttaagaaacaacaaagagaattgaaattgaaaaagcaacaagaactcaagttacaacaagaaaaagaattggaactcaagaagcaagaagagatcaagttacaacaacaaaaagagttagaactcaagaagcaagaagagatcaagttacaacaacaaaaagagttagaactcaagaaacaacaagagcaactgcaattacaacaacaacaacaaaaggataaattacaaaatcttacaaaaaatattttcttagctaaacaaaagcaagaaactgtgtccagtatactaaacaaagcacattcagaatctcaaaccaaaactaaattagaaattatggaaactgcaagattaaatttaaaggcacatgctagacaagcaaaggaagaaagtaaagaacaaaataaagaacaaaataaagaacaaagtaagcaaaaagatactaatcctgataataaattaacatcaagagatgtcaagtttttaactgtatttggattatctacagtaggatggtggtcattagcagagtagttgattctgattcttttttaattctgcatttatatctttattcattcattcatttacttttgttttaattttagtttttaatcgttatttggtttcttgtttttaatagattttttaaatatttaataaatcaacttttgttttgtataaagggtacataataagattagtaaaggtacatattatcaacacaaccgaaacctgcagccacaccaccttcattacttgaacttgtcttagatcttaataaatgaccagctacattattatttaaaatttcaccagttttttcattaaataggtaagtaccaaaaatacccaattctgaaacaataccatcattaagtagttcaccatttcttaaaataatattattatgaattttaggatgaattaattccatcaaaatataagcttcccactctgattttggaattgagttaaggaaatttggtatatcatctttataaatattattaccaccaccttctctttgaggttttaaaacaaaattatcaggtttttcaaatgctaatttgcgagctaataaaccatcattagattcatcaagtggataaattttacaaaatgtatcagttattttattaatttctaaatcattatcaataaattttgataagatatcctttttagttaaaagttgttgaattttctttgatccacttaattgagttaataatgaaggacatttaattgataatgatgattctaaagttattctaacatcccaagtttcaggttgattaaattcagatggcccatatgctgatctataataaacaactgaaacttctaatccttgataatataatttatttgaattattttcatcaattttaaccattgataaaacatttggtaattctactctcttagttatgacattatgatttttcaataattgatattcaatagctctttgatcaaaagcatttctttcatttggttgtataatcattaaaacaatcgatttattctcaccatttaaatatttatcattataatatttaacaccagtatataaaccatttgcaagtttttcatcactttcactaataactatttcattttctttataatatgttgagatattatcaccattattactatataacccattttgattaagatattgatgagttttaccaactttagaacttaacccaccaaatgatacactaacagtattaaattcaacttgtttaatttgattacttaattcatcatacatataatcagatctagttaaggatagagaaacatcttgtacaataccattattcaaagcctttaaataacaatcccataatttacctgtaaaatctttatcacttaatgataaagttttaattatgttagttaaccattcattttcacttactatattagcatataatttattataaattaattggatatctaaacttttcaagaattgatcacgaggtaaaggagttggataaattgtaattggtgcaagtacgggttgataatttaaatatggagcaggtggatacattattaatccattagagagaccaaattgagttacttcatagaccaatctttgcaattgctgttcattaagactagggaattctttcacgctcattttcagttgtctaattgaacttaaaagaaagatattccacaaaatatagaaatcaactcaaatccagtcttcattaataatcatgttgaagattgataagtaggggaaatattaccaaattcgtaaaaaattgaaatcagtacaccaaaagtttttcaaattgaaattttttgaaaagaaaaaaaattggaaattgccctgtttattttccaaagagggcaattgaagcaaaattgacacaaattgacatcttggaggctcttcctctggtgtttgcacctgtttcttctttcctctggggtggtatagagtcattgggatagctaggatatgtctctaaggttttctaaagtcctagggtcaacggatgatccaaatatggacagtttttctacattgaaacataaaaatgatttaaattcaaataataataacaacaatgatcaaacaaataatatcaaaattgaacattcagaacttcaatcaagaagagctagaaagattgctaaaaatactggtgtaagattcccaaattttataacttctttttcaatgtttaacaataatcattcatctcaaatgaattcgttaaataaagatcaaaatgattcaactgatttatcacatttacctttatcaacatcctctcctataagtttagcatctcattgtattaatactcaaatcaataaggatgattccgtaccttcattatatgaaactttatcaatgtttcttattgataattataatcttaatttattatctaaaactattgatcctttcaaaagatttgaaaaagtaaattttttcaatattcctcaaaaattattagattcaaataatgaatcaattgtcactggtatgggtatgttctcagaaattgaaagagcttggttaagtactgatgataaattatatatttggaattataatgcttcattcatagatcaagaattcgatattgttagtgattttaatggtacaatcttaaaatgtcaattggttaaaccaaaacaaaaagtttttgtggaatccgttaattatcttatagttgttgcaacttcaaaggaaattaaattattaacacttgaatattctaatgataataaaaaattaatcatttcagatcctcaattatctgttacatctcatggtatgattattaataatattgtttatcatgaaaaatcaagagatatttattttacaggtattggctgtggtacatcagtttggaaacttaaatattcagaatcaagtgattggtattcaaaatcaatttcaaaagaatgtctaactgaatttagtttaactgcaaacttaccttcattacctatcttaaattggctgaaaaatgatacaactaataataatgttgaatatatcgttgatttgaaaattgatcaatcaagacatatcttatatacactttcatcaaaatcagttattcaagcttatagaattaataacaataaaattggtaatccaataactaaacatatctcaagtttattaaaagaattatcaactacttctccaattaatattagatcaccattacttaaaaaatcaaatttgaaattaattagtatacatcctgtaagtaaaaatgaaaataaaaatttgttcttagttgttgttgcttcaaatggttgtagattttatattaacggtagtacaatttatgatgatcatctaactcttacaactaattttttaaagttccctccaatgaataaagcatttcatgaaaaaatttctaaaagaaaagaaaatatgttaactcaaaatcaaaatattaatcaaaataataatagccaaaatcagtcatatcttgggaatcaaaatttaataaatcaagattcaatgttaatgaatccaacaaaatctaaatataattcatacttcaactcatcaataaataaatcagttaaatctgataaatcaatcacaaaatcagtcactccattattaatctcacctgaagaactaagaaatgctcaagaaacctcagaaatcttacaaaatacttctaaatctttgataatatcacctggtatatttgttggtttttctgaagaacttggattatatacaagtactcctgattatggtatattcaaaaaggattcacaatatatagaagattttgaaattgaagataaattatcaaatatctttgaaattgttcaattaactgaatcatttaatcctgttaatcaaccattaggttatgcaaatgaatttgcttcacaatatactaaaaaacctttggaatttgcagttttatcaaatataggtatttcagtctatcgttatagaacaccagatttgattcttgaagattcactggatgatcaaacatttaaaaaattcgccttaaaatacggttttgatgaagcttgctcaactgcattatttttagcttgtaaatatgataaatcagaaacttttagaaatactgcaactcaatattttatatctggtggtaaaaattcaaaattagatcattcattatcaccaattattgataatgttgaaccaagtgatagatttttcgctgttttattattattttcacgtttaattagaaatgtttgggataaagaagttttcaaattaaaatcagatatcaaatatgataaaatgggttatattgatgtacgttcaattaagaaattagagaataaaaatagtattttagaagatgttaacattactaagagtgaattagaattcttattatgttctatcttaattgttattaattattttgaagataataagaatataattccaggattatccaatatcaataatcaaaatgaaacaacttcatggaaacaaaaagttagtgaagtttgtatacaagctgaacaaatatgttttgattcaatttctaaatttttaaacatagtcaaggaaggtttatcatttttagcaattttattagaagatagtcacaatgataatactgattcaaataatgaaaattttcaaaaaatcatttcattccttccaatccaattacaagcagatttaagttgtattacatttgctgatttctttactaaatctgatcctaatgtttccaaattaattaaagaactattatcatgtattattaataaatgtatttctgaaggaaattctgttgaattagttgcgaatactttacaagaaaagtgtggttatttctgttcaactgatgatgttttgattttcaaagcagttgaaagtttaaaacaagcaaaggattattctgatgcaaaggatatttcattaaaggaaaaatatttagaaaatggtattaaattattaaaacaaagtggtgattcattatcagatgaaataattgctgattgtgttaatgcaattttagaattaggatattattcaaatgctgttgaatttttattagatattgcaaatactcctgaattagtaaaactttcattacaatatcaaaatgatattcaaatgtcagttccaactgatataaataaaaagagatgtcatcaacgtaaactaaaactatatcatataatatttcaaattttaatagatgttgataagaaggcagtatcaagtattgaaaaggcatccaatgcttcacttattggatcaactaaggatgaatctcatatgtatgttgataatgaaggacatttagttacatattattcaaaattaagggatgaatgttataaaatttgtttaaattcaagtgataaattattacattttgaattatataaatggtttattgcaaatggtgttagtgaaaaattacttgttattgaaactccatatatattagatttcttaagacaggaatcttctcatgatttagaaatgagtaaacttttatggatttattattctaagaaaggtaattattatgaagctgcatgtcaattatatattttagcattatcacaatttaagattaaattagttgatagaattcaatttttatcagttgcaaatagttttgttcaagttattgaaacacaatttgttaaacaagatattatggaacttgcagctaaaattaatgatttaatatcagtttcaaatttacaagatgaattattaataactattttacaagattcaagagttggacaaatggctaaaaatattgctaaggatgcattagatggtgaaattttaacaataaatgaattatataatgaatatattgatccattaggttattatgaattagcattagtttgtttcaaattatcagattatagaaatcgtgaagatgttttatataaatggggatgtattttcgataaatggtttattgaatacaaagaaaaggaaaatcatgaaaatagtttgttttatattgaaataatgaataaatttatattaattgctgagaaagtcaaagatactgaaggtttatttacattaacagatttaataccattaattttaaaatctgtttataaacatcttgaagataaaagtcaaaaagttccaaagggtacatttattgaaattttcaagaagagtggtataacatatagtaaattatattataatttaaagaaagttatagagagtactacatttgaattatttgaaggttatagtgatgtattaaatgaagagatgtgttatttaattaaagattggtataagaatgataagaaattaaaacaaagcattaatcctgcatcaattgataaattggaaaaatacacagttaatgacgatccaattttcaattatattaaatctacaggtaatcctttatgattagaattagaattagaattggtatatttacatttatatttataaaagtatttacatttactgtattaatggtatctatgtttttaatctattatgatgacttcattgtcgaaaggttttgatggttgtagtttcttttctggttctttatctttatctttctccttctctattttgataattggaaacagttttgactcattatccttatctttatcattcccatcatcattttcatcatctgaaactaatgatacaatatcaactatacttaaactatcatcattaggtacatttttcaatttatcatcatcattttcagcacaacataattgatcatttcgtcgtctctctgcagcttttaacattaaatctcttataggtaaagtagtagaattaatattatttgaaccaagttttgatactttagttgtatataatttttgaattttattttgtgaaattaacttattattaaaattatttggataagatgttaaatttaatgattttttaatttgtaattccaaatatttatccttatattcatctaataatttatagaaaacattattatgaggaccttgagtattatgaactaattcatgtaacattgtacctacaatttcattagtatctaagaaccatttatcattattaggtgatcttaaacgtaaacaaattttaaaacctctattaacatttaaacctaataaatgattatcttttggatacatttcacataataaattaacatttaaattataaaaatccattattggagaaactaatgatgcaatttcatgtaataattctaatgctttatctgatgaatctttatttgttaatgatgcaattttaataattcttgatgtgggaggtttcctctcaggtggtttctttttggggaatttacccctacctttaagtaccattgatggtatgtggatgtagttacaaaataaaaagaaaagatgatgattagaaaattaaagaacgaatcatgtaaattatttttttagggtgaaattttgataacagtgggggaatgtaagaagtacattacatactattattatattaattaattagtctaaatacataatagaatgtttataaaggagatctacgtaaagatactgattaaatacctctattaaaccaaactgatttaattttatcaccatttttatcttttaaattatgaaattcattctctaatgaattagggttaacaaatcttctttgaggaaaaacagctaaagcaaaaggtaaagcaattagtgaagttgaaaaaattaaacctaaattagttaaagtaacagcagttaatgatttattttttaagattgatttttgtaattgaactaaaattaaaggaggtaaaaccataattggagttgcatttataactcttgaagcggcagtttcaccaactgcttgaaatgctgcctttttagaagtacctaaagtattaccattttcatcaaatactgatataccttttttaatttcttgacttctcattaaaaatacattaacaataccagcagaaacgacagctgcaaatggtactaatctaccaaggattaattttgaattatttgaaatatttttcaattttggtacaattgaatttaaacctaatgcaacaccacaagaagcaccaactgctaagaaataatttgtaactaattgtttagttgataaaggatgagatttatttgcattagcagtattaactgcaacatttaaagattgattagcaatttgccaaaaaattgtacctgcagtacctaaaccaggagttaacataccagctgtaactactaaatttgataaaacacaacaagacattctaaatggtaagaaaacagtttcaccagtatcaggatgaactgaagaatctaaaattttctttgcattccataattttggtgtcatttcaggtataacaccatttttataatcccaaattaaacgtttactttcttgaatatctttggaagttgataataacattgttggatcagatataccaatacaatgtttaactctaccgagataagtatttaaatcataacgagaatctggtaatgagattggacctggaacagatgatgccattgtctatgaagatatagttctataccaattcaaatcattaatgaaataccattagttgataaccaagtggaaaattcaagggtcgaccctggtgaaaaatttgaaaaatttgaaaaaaaaaattttttcagtgagtgaagaaattattttattttattttattttattatggtaagagtcatatattttacattgatgtgaacaatttttttaataatttaatttaagaatatattggtttattactacagttatactacaataaacgataaacccaatcgtaatttgagcccccacccctctcttaatgtaaacacaaaaggtaaacaaaaaattagaaagataaccttttttcacaacttgacctaatattatctctacaatccaaaacatcttatgcttagcggagattatattcatcaaatcaatcgttagagcattacattgatataaaaaacttaaaaattgattttttaagggttcttatctatgtagtgtcactaaggataaataataaaacacttacgtaacttatccataatctgacttgaccttcccaaacgagcaaaactatcctttcttatctgttatcttaatcacagtcttctacttcacccgctaagataatagctggaacgtatatatacatgtgaatcattgctgtcttaaaatatttcactcttatttcttttcttttcttttcttcttgtcttcttgtctttagagcacacctattatggaaaagttatactgttacttacctttaatataatgtggatgcacgttgagcttactccaatgtattgtttgtattgtttgtataagcttaaattttttgttatcttgattattcgttatctgttttcaaaaaaattatttatcttatctattatcaaaaaaaaaattattcatctaatcttatctgatcacacttcatcttctattgtcttttcatatctatttatattcctctataatgcccatattacaaattatttatccgctgttattcttaatacttgtaatatatatcactctttaaacaatgtcaaaaccttcattaacaacagggttctcacccataacttcagctcaatcaagaattcatgatattacaactggtgcttcaagtattagagaaattgatgctaaattggctattaatgatgatgatttattagctgaaattggttataaacaagaattaaagagaagattttcaactttccaaatcttcggtattgcttattcaattatgggtattttacctggagtttcatcacttttaggtactgcacttacagctggtccttcaggtgcagtttggtcttgggcaattgcttcttgctttattttaacaattggtattgcaatgtctgaattagcaagtgcaattccaacttccggtggattatattattggactttttattatgctcctgattctttaaaagttccattatctttcatgattggtatttcaaatacaattgccctttgttcaggtactgtttcagttttctatggtaatgcagaagaaattttagctgctgtttatttatctcatgatggtagctttgaaattactactggaaaaatttatggtgtatttgcaggttgtgttattacaggtactttagtttcatgtttatcatctaaaaatgttgcattattacaaagtgtttcaacttattgtaatactggacttttaattttattctttattgctttaccaattggaactaaaattaatagaggtgaatttaataatggtgctttcattttcggtagagttgaaaatttctcagattggccaaaaggttggcaattttgtttatcatttatgacagctatttggacaattggtgcatttgattcatgtgttcatatgtcagaggaagctaaaaatgcttcatttggtgttccaattggtatttgtggttcaattacagtttgtggattttttggatttttcatcttaatttgtacaactgcttgtatgaatcctgatgttgcaacagttttatcaactgatactggtttcccaatggcacaaattattaatgatttattaggtagaagatggtcaattgcatttatgtcattaatggcagtttgtcaatggcttatgggttgttcattaattactgctgcttcaagacaaatttgggcttttgcaagagatgatggtttaccattttcaagtattgttaaaattgttaataaaaaaatgaaagttccattaagagcaattattttagcttgtttaatttctttagcaattggttgtctttgtttagcaggtcctgcagcttcaagtgctttattctctttaggtgtcttaggtaattatgttgcttggtgtatgccaattttacttaaattaacttctggtaaggataaatttgtacctggttcattctatttaggtaaattttggtctaattttattggttggactgcatgtacttggggggcttttattatggttttagtttgtttccctgcaactaagagtgttactaagactgatatgaattattgtattgttatcactggtggtgtctggattttagcattaatctttttctttacttataaatataaatattatcatggtccaagaagtaatttacatgatgaaactgttgaaacagattcaagtgcagaagatgttgaaatgccacatgctgaaaaggtttgattgataattaataataaataattaataaataatgtataaatacactcaataaattccttttataatataattttaataacttttaataacttttgatcttattatttggaatagactgaattgagttgaagaaacttttcatggtccgcctttagtggtataaatagagcatgatagtttcctcgtgacgaacctaatcgactcttttgtcatttcccctgaagggaaattttgacccctacttactactacatatttaatttttgataacaagctaataataacaaatgtcactacaatagtaaacctttgagtatgtaaaccgtaaagaatccattaaatctgtagacactggagtatttgtaacatgaaaaaatgggtacatgaattttagatacgcgtttacgtaatcaactatcactataactatttgaaaagcgttgaaatgaatgttaatttaatgtactacactttctaatttcttctaaatgaggcgtgaatagtaccatatggaagaccaaaattttctctacaaaatatcaaatatggttttttagttaggctttcaaaaaaaagttatttttattttaatatcttttgccaaaaaaaaagagcaaaatttgaacacattgaataataacatttttttgaaaaaacatttttcaccataatttacatcagataataatctaaaaacgaatctacaaaatgagtttttgagcatttaaacttcttactaaaaaataaccaaaaagctagcttgaaaaaaccctaaaaaaaacgtccaaaattcactgaaaaatggatagagctcccaagtaaattactaagcaaatttcagagaactgcaattctaatgatccattgagcgtgtttcaatgacccataaataaaaagatcggaaagtcctaaagatgttgttcaggaaataaaaaaaaatcgcggttaaatatgtagtagtaagtaggatttttgttatcttgattattcgttatctgtctttcaaaattaattatttatctatcttatcggttatcaaatcaaacaaaaataaaattatcttatctaatcttatcttatcttatcttatcttattttatcttattttatcttattttatcttatcacttcatatcttgtattgtcttttcaattctatttataatatattcctctataatatctattatttaaaagaaccctttattatttattttcttctaatatcattatctctctttaaacaatgtcaaaaccttcattaacaacagggttctcacccataacttcagctcaatcaagaattcatgatattacaactggtgcttcaaatattagagaaattgatgctaaattagctgttaatgatgatgatttattagctgaaattggttataaacaagaattaaagagaagattttcaactttccaaatcttcggtattgcttattcaattatgggtattttaccttcagtttcatcacttttaggtactgcacttacagctggtccttcaggtgcagtttggtcttgggcaattgcttcttgctttattttaacaattggtattgcaatgtctgaattagcaagtgcaattccaacttctggtggattatattattggactttttattatgctcctgattctttaaaagttccattatctttcatgattggtatctcaaatacaatggccctctgttctggtactgtctccgttttctatggtaatgcacaagaaattttagctgctgtttatttaactaaagatggtagtttcgatataactacaggtaaaacttatggtgtatttgcaggttgtgtcattacaggtactttaatttcatgtttatcttcaaaaaatgttgccttattacaaactgtttcttctgtttgtcatactggtctattggttttattctttattgctttaccaattggtacaagagttaatagacatcaatttaatgatggtggtttcattttcggtactgttgaaaatatgtcagattggccaaaaggttggcaattttgtctatcttttatgacagctgtttggacaattggtgcatttgattcatgtgttcatatgtctgaagaagctaaaaatgcttcttatggtgttccaattggtatttgtggttcaattacaacttgtggattccttggatttttcatcttaatttgtacaactgcttgtatgaatcctgatgttgcaacagttttatcaactgatactggtttcccaatggcacaagttatttatgattcattaggtagaagatgggcaattgcatttatgtcattaatggcagtttgtcaatggcttatgggttgttcattagttactgcagcttcaagacaaatttgggcttttgcaagagatgatggtttaccattttcaagtattgttaaaattgttaataaaaaaatgaaagttccattaagagcaattattttagcttgtttaatttctttagcaattggttgtctttgtttagcaggtcctgcagcttcgagtgctttattctctttaggtgtcttaggtaattatgttgcttggtgtatgccaattttactcaaattaacttctggtaaggataaatttgtacctggttcattctatttaggtaaattttggtctaattttattggttggactgcatgtacttggggggcttttattatggttttagtttgtttccctgcaactaagagtgttactaagactgatatgaattattgtattgttatcactggtggtgtctggattttagcattgatattcttctttacttataaatataaatattatcatggtccaagaagtaatttacatgatgaaactgttgaaacagattcaagtgcagaagatgttgaaatgccacatgctgaaaaggtttaactaataattaataataaataattaatgaataataaataatgtatacactcaataaattgcttttataatataattttaataacttttaataacttttgatcttattatttggaatagactgaattgagttgaagaaacttttcatggtccgcctttagtggtataaatagagatccttttattcatgatttacttcaagatacactctttcttcaagaaacaactagagagatacagtccagtgtatattgagtgttggaaacaacattgaatacctgagaggtgtgtgtcaatcacactgttccttgtgagttttattttagtaatataatttgaaatcgttattaaaagttaatgaaaaacatacattactgaaaaattacaagtttaagacaagctgaatttattgatttgtttattgattatacaaatacacattataataaaatgaggaacgtttataatggagttttcaaagttactgattttactactcaaactgaaattcaaattgatgattatcaattgaaggtatctcttttagtaagaaaagaatgctctcatcgtacaataaatttttgaatacttataatgatggtttgaaagagttaaaacaactgggtattgatctagatactgttgaatctgtctctcgtcttggtatttctaagtataaggttttaactgatgcattttacaattgttttgataagaatactatttatattaaaagatacaagaaagttagtactggtaatcctgttgttatgaatagaatttttaaaatcatttcagacatgttttctgcaatgttgttaatgctccatttctctgctggtggtagttacagattgtttgagatgtcttatttcaatatggataatttgggcactattatgaaaatttattaacccgatgatggtaaggcatatctgcacattgtttctgcttattccaaaaacaagaaattggaaccaagagtattgattgtgaatgataaggtaactaggtacttcattcattttattttagctttgttcccattgaaaaaagatacaatgaaaaatctccgtttggatccctcaattaatgatcctgttcatgttttaaactttctatcaatgcaaatagtgaaattagttaatactgctattggtgatcaacaagaaggtttaaatgcaacaaaaaacgaattaagacaattggttgatagattaaatgtcatggaatccattaaattggtttgatgagttttattgcaaataatgaattctgaaatttccaataccgtaccgactgattgtgtccaattggaattgttgtgcactgttaaaaccaggtgttgattgtcaatgctgtttcgatttcctttttcagcggacctcttattgacttcaatgcatcagataagccataggcttcaaaaattgttgagcagaagtacttaagtttcgacatggtattgccgataagttgctgatctgtatatagttttgtttggcagtaagttaatttccaatggtattgattcatctgatgttaaactagtcatttttttcaattatgatcctgatgttgttacattcattcaaggtatgggtagaattcgcggtaaaggggtgtgtttaattattgataaggttaggcattgttttactgatgaaatgaaaactttttataacattgaaggccctgatcatgaaagttgttgcaattgtccagttgaagatttatttatcagaagaattttaaattgtcttgaggatatccattttgaaggttatgttgaagatttgggagaaaaggagttggatgaagatgaagctggaataaggaatgaaagtatcgatagagagaggagcagtaattttaatggtgttgttgatgtggttgaaaatgagtaccatgataattttgaatatgagaattttggaaatgagaattttgaggaaaattttgaacaagaaattgttggtcaatcttcagttgctaatgataatgatgttacagttaatgatcaatcttcagttgctaatgaaaataatactgttgttaataatgctgttgttaataatgttactatagaagtaataactgaaggttgtgatagaagtgattttgctgataacattttcagtgatgatttggaagaagtagaaacaggtaaaaggacacattctaatattgatggtggtgtgattgaccttgatagttctcctgatgcttctaacaaacgttgtaggattgttggttttgaagaagatattggttcttgtttgagttaaaatgagtataataattcaagaactttggttgatgatgctggtgttatatcaagtgtttctagctcacctattaggggacataatatgtcagagttgttaaatggtaattcaaatataaatggactatatctattggaaagttttacaaatgatgaagttgaaagtaaatttagaagtttattaccatctgaatttgattattttcatacaagctatagaatctttaggcatagagttttggatgaagatattcctaatatgagaaaccatttaattggtcttcgtgaattgtatgattggtttcccataatgagaaatttggaaagtaaaaattataaattctatgattacttgatgattgaacatgtgtttaaagatccaatgtttatttgttgttttccagaacttgtacatttatcagctgttgttccagataatcaaaatattgttcatttatgtgcagattttgttatttcaatttttgaaaaaagagatcttgcaggtatgaagggtagattgatggaattaaatccagtggtgttgaaaaaagcttgtcattatttgaaggaatttaagatgctctcaatttgtttgattaaatattataaacaaaagatcattaatccaaaaagtgatgaaaggtggagaaagttctacaaacgtcatgataaaaagttaaaatcttatggatgggaaaatgaataccataagaaatatccaattatcaagaagtttgttgaagatccaatttttaaaacagcattattcatttcaaatggaacttgcgttcactgttttggttcatgtcgtccatgtccatacacaaagatcgctaaggctgcaaaattgactgtttttaaattgtatagaatagcgtcaagatttgactaacaaccttttgtaatcagtgtcccctttataaataacaaacagtaaaagctgatcaaggaaagaaagaaagaaagaaagaaagtaataaaatggaaattgggaaatgtgggattctggaaacttccactattaacatacgcgagagaggtataaatagagaagggtttcctgtattacttatgattggttcttttctatattctcttctttctacaactagagattcattcaattatatttaaaagtcttgtttatattggcttatcaaccaagtgcacttatttatttgctttcagttggtagcaccggtgggaatctcccatgattttctttatttcttcaatagtagaaattccaaaaatccttgctgtttttcttttgatggttatgttatcttcttcatccttaatcaacttaccaacattagacgtatatgacatataattatcaaaaaaatccgttttattaatggtattaaaatgacctaatataatcaaaggaattctaatgcacaacgtagcaaatgtgtgtcttcctgtaataacgcaactcttgactttcttacatgttctttccattttgaaacaccaattctcaacaaaatttccaatatcttcccacttttctttattaggtggatcatttgagttgacataactttcaataagtgaggttgtgaaataaaatacataactgaatcaataatagtaaaatgtttagaaaatttcttaatgtttggtggaagtaaatgaacagtattgtcattgctttttttcatggaataaattcatcaaatctgattataaatggaaatatagaaaataattttgtgtactagtttatccagtatgtataataggacttctttataatttttaatctcttagttcaacttgttttagatttacctaactggtgaatgttttgtatactatgtcactgcttaaaacaataataaaaatatcttaacatgacaaaaaatggaattttggtgttataattgtaaaacaattttatgcaaaatttaagtgtttaaattaattcatataacaaagagaattagcccacatattaaataatatttccttgttctatactcacgtaaattaacccctttcaagctgttttaaatccaaatcgctgagccgccaatatttactttgtaaacgtcaatacaaaaccatgtgataaaacaagattcgcccgtgtagcgtaatggttaacgcgtttgacttctaatcaaaagattctgggttcgactcccagcatgggtgcaggcgaaatcttcaattatttttttggtttttagttgttttactatagtaatagatagtatcttactagatattaaagcaataaaacctattaggcagactaatatggtaccacagtaacttagtatatttagtctattaaacatactatacccccaccctctgcaacacgtagagtgataataatcttttcactgattagagaagaacgataaaaaaataacgtttgtttacttttcaaaatttagtagaaattacatgcaccatgattttattttaggttttatgattgttttaaataattatttgtttattgaatttgatttatatcctttggacactgaataatgctaatatagaagagatatagatctacattatatagtttaataaaatgtcgcaagataggaaaaaatcaagttcgttacaagatcgatattttaaaaaacttgcaaagcagaaagatcaaaacaatttgagtaatatcaatgaaattgatgaaacaattaatgatgatattaatttagacagaccatttggaaggtttgatatacctacacgttcatattctcctgaaagatttaatacaagatcaaattcaacatctcctataagatcaccaaatagatttgataattatgatgattatagaaatttacgacataatactgatattgatactaattttcatatacccagaagtccatcatcaacggagagacttatcacacataattttaacaatgagatagaaaatccattcataacttctaaaattccatttttaaattcttatgatacgaatgataatgacgatacaatacaattacatgatttagaggcacaaaaatataatgataatttaactaaaaatccattcaatgatcaaattgttgaatttaaatataatgaagttaataatagcaatattaataataataataaaaatcaatcagattcagtatttcgaaattatagctttgatgatgatgaacaattagatgatgatgaagaatttactcctttccctgtaatcgaaaactcatattatccaataaatactccacgtgatgtctataatccatttgatgttgaatactcatcatctgaaggatctgacgatgattcctttgaaactgaaagtaattttgataaacaacaacaacaaggtagtttacgtagaaaagatacaaaatttaaaaatgcaaaggctattaaagaaactgttgattattatgatatggatcaagaaatgtcagatgaatatgaaaaaaatccatctgctaaacaagttcgtatggttgatggtaatttagttcttgattgtccagtttcagaaattttgttaagtaaatataaaataccattaactgacaaggatagagagtttctatttatgagatttcaagcatgtacagcagaacctgaattatttcaagcaaataagttctcattaagacagaaattctataccaaaccaagagaaactgaattaatgattgttattacaatgtataatgaaaatgaatttctattagcaaagacattaaaaggtgttttcaaaaatataaggcatttatataatatgaaaaattcatctacatggggtaaaaatacttggcaaaaagttgttgtttgtattgttagtgatggtagacaaaagattaatccaagatcaaaggcattacttgcagcattgggagtttatcaggaaggatttgctaagaataaaatcaatgatgatgatgttgtctctcatatttatgagtacacaacattagttggaatatctaaaatttatgatgatcatatcacattaacaacagataatcaaattccaattcaaatgatattttgtttaaaggaacaaaacaaaaaaaaaatcaattcacataaatgggcacttaaagcatttgcacctatattaaatccaaatgttataatcttaattgatgttggtactgaaccagagaataaatcattatataaattatggaaaagttttaaagataactcaagagttgctggcagctgtggggaaattaaagctagtttaggtaaaggatggagtttattattaaatccactggttgcagctcaaaattttgaatataaaacatctaatattcttgataagccaatggaaagtgtttttggatttgtcacagttctaccaggtgctttctcagcctatagatatgaagcattattaggtgatccactagagaaatatttaaagggagaagatttaaagaaaaataatgatgatgggatatttaatgcaaatatgtatttagcagaggatagaattttatgctttgaattaattgctaaaagaaatgaaaattggattttaaaatatatcaatacagctggtgcttatactgatgttcccgagagtttagatgattttatttctcaaagaagaagatggcttaatggatcattttttgcagctgtttattcagtttgtaatttccataaaatttggttaacaaatcattcaattggtaggaaattatttctgcaaatacaatttttctatcaattattaaatttattagtttcatggttttcacttggatcatattttttagttttcagaattttaagttgttatttagctgaacctagtattaatttcccaccaggtaatgttttatcagtttttttcctttggttatatatggcatcaattactacaacatttgttttatcatttggtaataaacctaagggaactaaaattttttatttagttattgttattttctttgctgtattaatgtgttatatgatttttgcagcagttttcctatcaatcaaatcaattgaagaaattattaaagaaaataagacaagttttagttggatattattagttaaggaaacacaatttagaaatttattaattgcaatttcatcaacatatgccttatacttgattggatttatattatttttacaacctattcatatgtttacaagttttgttcaatatttattattatcaccagcatatgttaatgttttaaatatttatgcattttgtaatattcatgatatttcatggggtacaaagggtcaagataaaataaatgatttaggtattgcaaggaaaggtttatctggtaatgatgaattagaaattgttattccaacaactaaatatcaaattgatcaaggatattctaaaatggttaaagaattaatgacagttccaataaagaatgataatgaaggagataatattgattcagaggagaagaataaactttattttgcattttttagatcaatgacagtattattttggatgtttagtaattttgttttagttgcagttgtaacagagacaggaggattatcacaatttagtagtaaaagtgattcaaattctgatggtgggattttacctgcaagaaggacatttatatttttatcagttattctatatgttgttgcatttatggcattgtttagattgattggtagtgtggtttacatttttcaaagaatattaaataagtttggatttagaacataagaacctaaggatatttaattattatatacaagcatagattaaaaaccgtaaaaagatctaccagaatctttaatatcactcttcttttcagctaaagctaaaattctttccattttttcatttgtaaaaccatcattaatataataagattttgtacttttcaaatctttatcataagaaattaaattaacgaaaccgaatctacctctataatcatttttaccatttggaacaattaaactatcaactttaactaattcattataagttgtaaacccattccaatttaatttttccaatattaaagtttcattattaattaaattttcataaatttgaggttttgttgtatcataaactctccaaactcttgaaactactggttcgaaaagataagttacaataggaaatggtaataatgataatatagcaattaattgtgatatttcagtataaactaatccagttctatccattaaataaccaaacatacaaccaattgcaccaaatgctaatgataatctctttgaaccaataacaaaattaattaaaggattttgataaattggtaaattacttaatctaaatttcttatcaagttttaaattatggaaacttgtaccatgagttctatacttaatttgatactcttcacctaaatttggaacataatattgtttctgatcttcacccattttaattctatcatttttcactgctgaggagtgaataaaacgggttgaaagtaagaaattagaagttattgacttatttcgtattcccaacctataacaagacatcattactcttacttctacctctttaaaccgtgtataacccactaataacccagtaataaaagcaaaacaaaagcaaccacctacagtaaagtgatgtatcacaaaaacatgtaaccaggcaccgccaaaatggaaaaaattgaattttcgcagtggcagtggacatgaacaaatttttttattttactttactttatttcactttgtttcttttgctgttttcctgtagaattggtactattatcacagctttgccttccctgattcagtagaggaagaacagaaaggaacaattttagtgtttgcgaaaataggttatttgaaattattaataagaaacattaattaattaatttgaaaagaaaaacataatggattccgcagattcaactaaatacgtgccagattacagaaaggcaaattttaaaaacaagaatagatttcaacaagatgaagttagaagaagaagagagactcaacaagttgaattaagaaagcaaaagagagaggaaatgctttcaaagagaagaaattttacaacaagtgatggatcaaatattaatggattaccagatagtgatgatgatgaagattcaactgaggaatataataatgatcaattattttatactcaacttcaacaagaattaccaattatggttaataagattaattcaggtaatttagaggatcaacttgaggcaacaattaaatttagacaaattttatcaaaggagaataatccaccaattgatttagttattgaatcaggtattgtaccaaaatttgttgaatttatgaaatctggacctgaagttttacaattagaggcagcatgggcattaactaatattgcatcaggtacaagtgaacaaactaaaattgttgttgatttaggtgcagttccattatttgttgaattattatatgcacaatcaccagaagttaaagaacaagcaatttgggctttaggtaatgttgcaggtgattcatcaacttatagagattatgttttaagatgtaatgcaatggatccagttttatcattatttcaatcaagtaaaatttcattaattagaactgcaacttggacattatcaaatttatgtagaggtaaaaatcctcaacctgattgggcaattgttagaagtgctttaccaactttagcaaaattaattttcagtgttgatgttgaaactttaattgatgcatgttgggcaatttcttatttaagtgatggtacacaagaagcaattcaagcagtttgtgatgctagaattcctaaaagattagttgaattattaggtcatgaatcaacattagttcaaactcctgcattaagagctgttggtaatattgtaacaggtacagatttacaaactcaaattgttattaatgcaggtgttttacctgcattaggacctttattaaaatctaataaagaatcaattaagaaagaagcatgttggacaatttctaatattacagcaggtaatgcagatcaaattcaatcagttattgatgcaaatttaataccacaaattattaaattattaacaacaggagattataaaactaaaaaggaggcatgttgggcaatttctaatgcatcatcaggaggattatcaagacctgatcaaattagatatttagttagtcaaggttgtatcaaaccattatgtgatttattatcaattgctgatattaaaattattgaagttacattagatgcaattgaaaatattttaaaagttggagaagctgataaagaggcaagaaattcaaatattaatgaatattcagttttcattgaagaagctggaggatcagataaaatttttgaatgtcaaagtaatgcaaatgataaaatttattcaaaggcatttcatataattgatacatatttctctgatgaaattgatgatatggcagattatgataatatgcaaccaaatattgatgtaaatggtcaacaatttggatttggagttgattcacaacttcaaaatggtggatttaattttaattaattaattaagttattgaattaagttaattctatttttattaatttctttatattttttctctaaatttattctttattacttatttttttcttttcccttatcttcttctctcttctctcctctcccttctcattctcttaacctctttttttgaattttaattaacttcaaatttaacttttataaaccttttcttaattaatcctttaataaattattatatattacgtcatcagaaattatcatttcagtcacacgccacattcgccgcactgtcttagaaattttttatttttttccatgcggctggtgaggtaataatactaataaattagtaatttaccattaattaatatactaagtattagattgtaaatattataagataattataaatatttgtttatgattaaacgaaagaagattagatattaattaaaattaattaaatagtaaaatattaaaatattagaaacatattattattattattattgttgttttttttcgataatgttaaaagtgaaagtaaggtgatgatagtagagtagaggggatataatataatttttttatttttgaaaacttattaatattataattataataataaagcagcggcagcacaaccgacagcaccagcagaccaaccaatgactgaatttttcattgtaaaaggacttgaaattgcatttgcggcattttcttcaacaatagttgtagttgtaacttcatgatgagtattattgaatttaccaaatttatgagtaccagttgaagaagaagtagatgaaccttcatgatgagtattattaaatctaccaaatttatgagtaccagttgatgaagaagtagatgaaccttcatgatgagtattattaaatctaccaaatttatgagtaccagttgatgaagatgtagttgaaccttcatgatgagtattgttgaatctaccaaatttgtgggtaccagttgaagaagaagtacttgaaccttcatgatgggtattgttaaatctaccaaatttatgagtaccagttgaagaagaagtagatgaaccttcatgatgagtattattaaatctaccatatctatgagtaacttcagcacctgattgagtaatagttacagtagttgttggtaatttagcatctgccatagcattagcattagcatcaggttgaggaattgcagcagcatttgcagttgagagcacaataccagataataaaacggaagttaacttcattatgtatataaattgatttggctttactataaggaaagtgaaatttaaaatgaaaaatctataaaaagctataaaattcaaagattagagataaattcaagataaattagagataaattagagattgtaataattgaaaataatcataattctatttcaacataattgagcaaacagaaaatactgaaaaagtattacctaatacgatacataataaataatgaaaacacagtcggtgaaaattttcattggctgggaagtgttgcttccgttgtccgcgcacttactcttttgggcaataggtaaacacccgggtgatatttccatttccattttcattttcatttacccgcctccgccggttattgggcgcgtgttcgaatcttaaattagcaatagtttttaacttaattttttaatttgccctcgaagaaataaattagctgagccaataattgccctgtttcataatttttaatttaatttttttaatttttttaattggacgaccgtccagttttacaccatttatttttgcatgactttcaatttagaggctcatttctgtttttaatttattgtttcaatattggatatcgatttattattaaacaagtactgtatactacattatatactatataccaccgcttctataaatatgctgagtaaacgaaaaagaaatactcatgaagaagaatctaaatcacctgcaaattcaatttttaatccaattataaaaaggtctagaattactcgttcaacttatggttcagcagctgaattaccaatagttttagattctgaatctgaatctgaatctgattctcaatcagattcaacttcaaatttggagaatgaaactgatataacaacagattctgaaattattcgtagtagaaatactagaagtactagaaataaaaacaccaatctctataaaaatacagatatctcgatagattcagataatgatgctttactaagtggtagaaaaaaatcaagaccaaatactccaaaaaaatcttcaaatattaattcaacagttactcctccatcatctgcttcatcaaatatttcaacttccttaagttcaacgaaaaaatctttaaagaaagatatactgaaccctttacatttagataaggcaattttaaatcttgccgtaaaaaattctttaaaagatattaaactgaataatgaaaaaaatttagttactgagaataaagaagaggaaaaaattattaatgataaaacattagaaaaaattaaggaattggaaaaacttgagaagcttaaaaacgaaaaagttgagaaggttgaaaaggctgagaaggtagagaaggtagagaaagatgaaaaggtagagaagatggagaaggctgaaaattctcaaaaggctgaaaaggctgagaatgttaaacaggtagagaaagctgagaaagctgagaaagctgagaaagctgagaaagctgagaaagttgttgatacttcaaaggttgataaagtcgagaaagttgaaaaaggcgaggaagttgctaaaactataccaaataaggaaagtgaagttgcaaaaagtccaaaaaaacaacagcatccaaattcccttgcaaatttaacaaataataaagccaaatctagtttagcgaatgatactaccatcaaagatactaaagatatcaaagacattaaagaatctaataaagcggatgaacataatttagaaactaattcccctaccactcccaccaatcccatcacacaaaatgataaattagcgactaataataactcaattgcagaaattcaaactgttaaattgaaaatttcaaggaataaattaaagaatccagataaacatgaaacacagaaatcaatagaaaaactaatttcttcgcgtttacaaaaatctgcgaaaaattatcatgattcaaaccccgaactaaatacatcaattccaatatcaacccttaaactgaattttgataaaagagataagagacttcaaagtttgaaaacatcatcaattgataaaatccataataaaattgataaaattgataaacatgaaaaatttgacaaaattgacaaaataggaaaaatcggtaaaatcggtaaaatagataaaattgaaaagccagtagttttcgatccaacaactcacaaatcttataaagatatttattcaacaagttgcatatcttgtaccaaaaagggtagaggtgattattgtaatagacaacaaccttgtgatatttgtgttggtaaaagactgaggaaatgttattatccacctgatgcggaaattgtaattcatggagtactgaaaaaatcattgagaaataataatagacaagataattttattgataaaaatcttaaaaataataattcttcaacttcgaagaatgataaggaaaataatatggatagaattgttagacttaatctgagattgggtaaagatccaaagaaggttaaatctaataaaagatttgaagaatctgaaactgaggaagaatcagattcatcatcatcagatgattcagaggataataaaaataatgctgattcagaagataatgaaactgaagaattttcatcagatgatgatggttattattatgatcacccaactcgtaatggtaaaaaatatagatataaatatagttcaagaaaatcttcatcaccaagagataattttgagaaggctcaaaaattattaaaagaattagaatttgaaaaaagagatgttgatgtttattctgaaggtagaaggcgtagagctgcaactaggggtaattatttcataccaagtgatccagataatgattcagatgatgatggttatgcagctgctgaagctagaaatgaacaaattattttaagtgaagatgaagaagagagaagaatgttaagaggtgaacttgatatggaatatgttaataatttaagaagagagagagataaaaaggttaaaccaattgaagctagtgatgaaagtagtggtgaagatgatatgttctttggatagaacttataaattttcacatcctacttttaatatatttttagttattaaaaactttcaattgagaaataatagattaagaccaataaatgtatgattatatcaggaatataatacaaacttatctattattaactcaattgaagtttttaaattgtataataaactgttttttgcattgctaccaattagctatccagaaggacaaaaagaaacactattttaaagcactgtcaactgtgttttctggaaatgtttcaagttctttgaataaagggtattattaattttgataacctagtaaaacccccattgcttacttttccttgagactggtagcaaaaagttgtagttacacgtggaagatctgcttttctaagtaagtaagattcaatgttccatggtacctcaataatgagttgttacgtaacgtaatcacccagggccaaaatccgagcagcttaattggaagctcatcatagatatcgacttatcgatattatgctatttatttacaaaattctcgatgatgattggttaaaaattccccataataaaagcaaagcaggaaatgaccttcctaaaaaaatcgatgacgtcacgcataagaaaaaatattttgcgcgcattcgaaccttttatgaagatttttcaaatattttcgatagctaatcagtacttaaaatctaagatgctatattgaatttaattaaaagatcataagaagaaataaactatacaggaatcacaatgagaaaaaaaataaactaagacgatctagaaggaaacaaaataaaatagaataataattttattgaattaatcaattaattcagttaaatatttatccgagaaatcaaaaccacacatttcagcccatttaggttgataatcaaattttgaccattcattctgtaatgcattaacttgtaacattaaaccagcttccatatgccaaccaatatgacaatgaaatggaaaaacaccaggattatcaatgacaattcttaaaactgcaaatccgaaaggtggaactgaaactgtatctcttaaaattggatttgttaaatctaatctttcaggatgtttttcataaaaatttggataaaatgaacctgttttagaatttgctaaaacccaaaatttataaccatgtaaatgaaatggatgagcaccatcatcaaaattattaattaagaaatcaacaatcatatcacgtttatcaaaatttaaaatatattgattttcattaaatgtttgactattctcaatatgagaagttttattaaaattttcattaaataataattcatgcattgttgaagtatttgaaagagctctccaactataatcattaaaataagcaaatgacatttggttaccaccttccataaatgaaacatctaattcaacaaattcatcaggtctatttgaaccatttttattaattggtacttgattatttaaagttcttaattgatcttgtgggaaatctaaacattttggtgaaccaccatcataactccaagtttctttactttttggaattgaatattcattattataagaaataattgccaaaacatcagttgaaaaatcaggattattagttgctaaacaaaattgattaaatctagcatgaatccaaaatgaatctaaatcatgattagttctattcatgaaaaatgaatatctttcaccaactgatacatcaacataatcagaaattaaaggttcaattaatgtaccatcaacttcaattaatgataatttatgttcatctattgaaaatttaaaaggtaaaaaaaatccaacattaacaattctaattctataatttaaatttggatcaaaataagttgaagttttaaatttattattttcatcaattggtgtaaaataatttgttgattgtgaataagtacctgaaattaaacctgcatcaggtgttggttctgaattttcattatcaggtattaaataagttgataaaagttgatcagcatcttgataataataatcatttgcaacataaactctatcagcatcataattagttaagtttgaatcttcaattggagaatgaataattaaaggaccataaacaccatcagcatattgagtaccccaatgagaatgataccaataagtaccaaattctttttcaccaattggaattttataagtataatttaaacccggagcaattggacaaacattaattgaagatgcaccatcatcaaatgaattatttggataaaataaaccatgtaaatgaaatgaaactggttcatcatccattttatttaaaacatgtaaataaattgtatcaccagaattcgcttcaattagaggaccaggatattgatcattaataacagttaaatttctaattgcaccatttgcatcaattttcagtaatgaggtaatattaaaataataatgtctatcctttgttgtattataatcatttctccaatattctaaatttgaagtataattattagcagtatctaatctccaattagttgaattattattattattattatcattatcattatcattatcagtatcgatactattaccgtcaatatcttctttattttgtttcggtactatattattattaactttatgataatctggagaaagtgatgaattagaggataaattgtttaatttatgatgagatttagtgaataatgtagttaataaaataattaacattattgaagatgcaatgattgtacctgaaataaatattttttttctataaaatggaacttttttattaaattttgtattgtttgattcatttaatgaatcatcatcattatcatcgatattatcattaatgtgattaatattatgattaaaatttgaatcaattgaatttctagaagggtcatcaaatggattaatgtgatctaaattgtgtaatctgacagattccattggatagatttggttaataaatgagtaaataaaattaagattaattagaatgaaatgaaactgacaagaccttatattaaaatttgagcaaaataacctggcctatcaccttcttttaaattgtaatcaatataccattataaccccttaattaatcaaatgtaatgctacattcaattaaattaccattaaattgttattctttttcttcaatataatatatatggaatcaaatgtatctccacgtgggaactaatcatattattattttaaaaagaaatcggagaaaaaaataataaaatttccgcgcttttctcttaattgaaaaattcaaattttagcatttcatcagcgtcaggtctccgatctctgttccacacaagtgttgcattgattaactcttcaaatttactaatatcaacatcatattcatttctaactgattttctaatatactccttaatacttttattcccggttattatgttggatgttcggtttgttttcctctttaggtattcttgattaatccccccattcttatcaaatgctttccatagtaatgtattataattaatcgtattattatcatcttcgataataaactcatgtcttgaattcaatatgtattttctagatggtatatttaaatattgaattaataaaataaataattcaaattcagtttcaggttggaaaatcggtttaccaattaataattcaattgaaattaatccaattgaccaaatatcaatcttttgattatatttacatcccattaaaacttctggtgatctataaaatcttgattgtaaatatgtatattttgtcttaccattataacatgatgatccaaaatcaattattttaataatacctttattattaatcattatattctcaggttttaaatcacaatgaattatattttgtgagtgtaaataagatacaccttttaaaatatttttcattattgttttgactaaattaattgaaaatcctttaaattcattaactttaattgcttcatataatgaaatacccgctaattctgttataatacaaatatgtgatcgaaaattaaaatgttcataatatttaactatattttcatgtcttaaattcttcattatcttaatctcttcaattgattgtaataaatatttaggattattaataattatcttacatgccattaaaacttttctattctgatcttcaaatgaatgattaataactgaaataactgatccaaaggctccattacccaatattgattcaatttcatatttataatttatatgatctccaattataatcttatacttattcttataatcatcaaatccataattatttttagtgtttttcaaatccgcctttatcttaattgttttactaatacctgtaaaataaatattattagggaattgcataattctttcatacattgataaattactaaataatgtcggatttttagtacttaaatcttgaaacttatatggacttttcatatgatactctgccaattcattgaaatctggggtatttttctgatatttttcacatgtattgggatttctacttaataatttcattaactcatcaattgaatcaatttttgaatgttttggtttattatatgatgataatgataatctaatagatgatgatctacttaaccttgatttattaacatcagtattcacttgacgatctcgtatattattggtatttattgaaggtttattttgaactatgtaattaaattttaatgatttactcggtatatctctaacacttgatgatctaggtattttcgattgatttattgataatcttgataaattggaattattaatttcaattgttttcttagtattgctcatcattatattggagttaattttggccttgctttgattttgattttgattttgattttgattttgattttcatcatttataatagcattcaaattattacaagatgcagtagataaaggtattttggataatgatgaatattgcattggagtataattaggtgctaatgacattctattcctttgcttatttgatctatgtgttatattgtcatttctactgaacccatttctacttatattattaccttcatcaattgtactaattgaagaatctggccttatgggtattctagttctatcattgcacaaagactgacgtctataggaagacgacatctgttagtttctcaaatgataatccaatctgaaaagaatataacataaaatgaacaaactaaaaaccttctttgtttcagatcgaaaaaacaaacaaacaaacaaacaaacaaacaatgtggaaacctaaataaaaatttcatgtcgctatattattaaattattattaatcaccaaatttctcttagtttaacaatttgtccaatggcaatatataccaggtagtatagtaatataagaaggaaacaagactaaatgacaccacaggaataccctttaatactacaattagtactatgtgagcttgttcatgaagcaagtgcagattcaacatgggaagacattactaataaatttatgcaacgtcatgtagttataagacttcatcattcacttttgaatactttaaaagaggaaataactcctcaaacgattccaaatatcgttgcatcaatagtcaatcacacattacaaactttgagtaggagtggcaaacgagattcagtggcgatggcggcggcggctcgtcaatacgaagaaataagtggggatcccaaacttgaacaattcataacttctggtaataaagaacgtgaatcccttgtacgatgctgtacaatcctgcacaatctctgtgttaaagatgtgaaagaagagatagaaaccagaaaagctcagtttagtaagatcctaaaagaggaaaaacttgtttaaagtgagagagagacagagagtctatttttttcatatagagggatttccatagtagtagtaatatatctttaatgtatagacctttctttagcttttctttagtaaagacacatattacagggctcttattgaatatctgatattatcattatcatctgaaaccatgaatgatcctattcacgataagaaactgtcaaatactggttctaatagtaaaaatgatgaaaaatttgaaattcagaggaaattatccttatatgataatacattgaaaatggtccttgattcaataaagaagggagatttaaaggatggacaagatttacaatcattatttgttggtatgtcaaatgatttccaagttaataaaattattgatgatattaatataaataaaattcaaaaattgaaaattaatgatgatatagctgtctcttttgaacctttgaaatatattggagattttggaattgatgaagaattaccagataatattgttgatattcatgcaaatacaactcctgatgaatatattcaacaaatgattcaaattataaatcaaggtaaggaagaacttgaaaataaaattaattctaaatctaaaacttcatctgatagaaaatataatcagttattatttgatactattaatgataatatggaagcagctcatgatgctgctaataatcgtaataatgaacaaaatacttctaatgttccaatagttgaaaatgaagaaaagaaacaaattaatgaaccagaacatgaagaggatgatgacgatactggaatctgtgaatgtgatgaatgtaaaatttataacataaacgctaataaaagtaataatgataatgacaatgccaatgatttttctgttcaatttgataatggaagtaatactaatagcaaaaagattattaacaacaacagtaataacaacagtaataataataataataataatgccaataacattacaaacaataaattagttaatttacaaaacttatttgaagatgaaattgctgctgctattgcaaacttttttgaaaataataaacatctgttcccatattttaataatgaacaattaaaaatgttaacagaaaataaaccaagagtttcagttgatgcatttacaaaacatttaaatcaatatcaaaaagatcgttcaaaggcaataaaagatttaacatttgcagatatggcagatatggcatcatacgtttttgaaaaagaaatgaaagatcgtgatgttgatgtagattttaaatttcgattacaacatcatcaacaacaattggagaaacatcatcaattacaacaagaacatcaaaatttaaaattacaacatcaatattataaacaaaaacatcaacaattaatggatcaatgtgaaatggctaaaaatgatttaactacaaattcaaattcaaattcaaattcaaattcgaatccaaattcaagatcaaattcaaatccaaagataaattctagtgtaaatgttaatttatatgctgattcaaacggtaatattcatgccaataagaattcagatatatcctctaataatcaaaatactcaaagaaaaactaaaaagaagttgaagaagaagaaacatcatacaggacttcaatatattaatgataatcctactgatgaagaaaggaaaagattacaaagacattgtttacaaatgttatttatgaatgatacaaataatgatgatcaacaacataaacaacaacaacaaaaaaagaaaaagaataaaaagaagaagaaaaatggtgtaaatacttttaataatgaaataagtacaattaatcacgttggttataataatcctgcaaatactgattggttatgtgaattatgtgaatataaaattgtttatggagaaataccaatatttttaactgaatggttacaaaagaaagctaataatcaagaaaaaatggaaaattatcaaagatatttattagcacaaaggaaagagcttaaaagagagcaattacaaaggaataataattataatgataaacataattttaatcataaccatcataatcatcatcaaaattgtgaacatgatcatgaaaatgaacaccaatatgaacacgatcataatcaccaacatagtcatgaacataatcataatcataatcataatcataaccatgaacatgagtgagtaaggattaacgcactgaaaaacgattttattatgatgtttttataataatgtatactcaaatttataataacatggttaattacctaccaatcttgaaatatgttccatttccactaattcatttgtagaattttctaaatcagttttatttttactatcctttaattttaaactattcataattaattcatcagctgcgtcaccatctaaaagttctaattgctctttaggaaatattcttggaaataatattggaactaaaattaaaattaacattaaaacacctgggaatccaattgctcccttagtacatgtaatactatattcacctgcaaatgcaagtaattctagtaccacgtaaattttaaaatattttggatcagttttgaaatattcaacagggaaatctgcaggtatgatatgttcaatttcatcatcagattgggattgactattacgatcattatcgttagattcttgacaagtgctattaacttttttaacggtatcattctcattatcgtccctaccaaaattcgattctacactgttatagttatcatcaactgcatttgaattattctttaattttgttttattatcatcatcaataacgattttagataatttagttttccatagatcatcagtaaatataaatcttaatcttctaacaacatcagttccatcaattgttgtaattgccataatccaaaataacccagctaaaacaccttgaggaatcaatcctaaaacaaccaaaaatggacgtgtcatcataactaatgtaattaatccttgaaatgtattacttaatctttgttcaacaacttttgtaattttattaataccagttttataatcatattcataaatacataatgaataagtatgtaatggagcttgaggaattaatccatttggagctgggataccaattaaacctgctataccagtagtcacaccaagtaagaaaaaatcataatggaaagaagcaggttttttcaatgggaattcagatgattgacacattaatgatgaaatattatgatcataataaaataaaattgttaaaagaattgcaaatggtatagctaaaaagacttgtccaacagttatatcttcccagaaatggatcaaccaattaggacctctattaattgtatcagttggatggaaacttctagtaattggtaatctagggaatttaacatcatctaaacgaccaccaaaatgaataaatcctgtaaagaaaataacacatagaggtgtactataatctctaataaatgatctaatattatgagataaataatgtgattttgtaccaaacatttgagctgaaattccaaatatagccattatcaaggcaagcattattgatgcaaatgcaccagctgtatcagttaatgagaattgatgagttaaaatttgaatacctttttgaatataaactatattaataaagaatccgaaaacatcacatgagaatttagtaacatatctcataaaattaacactattagtaaatgctaatataaaatggaataacattgaccataagcaaatccaacacatgaatgggaaatatggtatattcttcggtacgacaatttcataaactgtataattgaaaatagatattggacctgtaactccaacaatacataatggagatcctgcaaaaagtccaaacacaataccacccattgcagatgcaagtaaaacttcattaacaccataagaattattagtatgatcaaacatatcttgagcaaatgccaatgcaggcaataaatttgtaaagaatatgtaaactgtggatggaattgtacgatatgttaacccatcctttatatcagatacataatatttgattaatctatccttgatatcataataaattcccttcccagtgtctcttaaatggaaaagctgattattcttgtatgagttgattctttcattgtaccatgcagtaaatgacataaatatttatactattaagcgtatgtataatgagaataagaacctataatagattatttgttaaaatatgtattcaactctactataaatgactgtataagatatacactataaaattcaagggcttggaaaaagagataggcacatgtcatgtacatgaaaatttaatgaaatgaaaaattaatttttcactattaatatcagtgatatatcctttctttatttgatcaacaagcaaatgttacgtggtattaagacatccaactacattcttcaatcggtcagatggaactccactaatggaccagtagcaccatttgcaactccagattatcaaggtagaaaacatgttacatttgataaaaatatgccatcatatactaaaccaaaggcatgggagagagatggacaagataaggaaaaatggtttaaacgtaaacatgcacatcatcatatattacaaaaaccacaacgtgagaatattcagcgtaggtatgatggtattaaaaggaaaaatcatgaagaaagaatggaaaaagttaaagaaatggaaaaaataagagaacatagaacaggattaagacaaattggttcaaatcctaatattgatatgcttttcggtactaatgcagttttagcagctttaaaaggtgataaaagaaagagatttggtaaattatatattcataatccaaaggatagtgaaaaagttaatgagattttacatttagcaaatgagaagaatgttaaaataacggaaacttcaaagcaagatataaatcaacttactgataatgcagttcataatggtattgcattagagactaaacctttagaaataacagaaattaaaagtatgagttctaaatttgatgaagattcctttaatattaatattagaaatgaaatttccaatataagtgaagataaggaaattccattagatacatttggtaaaagatatccatttggtatttatttagatgaaatttcagatccacataatgttggagcaattttaagatcagcatatttcttaggtgcagattttatcgttttcagtgaaagaaattgtgcaccattaacaccagttgttgcaaagtcaagttcaggtgcaatagaatttttaaatttatttaaagttgataaaccattaacatttttcgaagagagtaaggataatggatggagtttaatttcaacagttgcatcaactggtaaaaataagaagaaaagttcattaattgatgcaaatacaattaatgaaatgttacaaactcaacctgttatattagttattggatctgaaggtgcaggtattagaactaatttaataaatagatctgattatttagtttcaattgaaagtggtagagaaatgaatgaatgtgttgattcattaaatgtttcagttgcaacagctttattaatttctaagatattaaaataaggagggagggaatgtatttaataataactagtacatcttgtaaataaatagaatatttatcatgtatagtattcacctaatataaaattaattttagaataatttttttttcttatatacactatatacaatatgagttctataaataatagtattattatactaatactatcaatttttattagaagtttcttcattagcattaactttcaataaatcaaggatatctctcattaatgaaggatcatttgcaggtcttgaaactgaatttttcatttgaatatttgatgatgaaattttagtaacaggaacggcatttaagtttaagtttttattctttaaattcaaagttacattatcaactaccaatggtacttgaacttgtcttgaaaatttattttcatcaatcattttagtttgagatactaatgattcaacataattatcattagcagcttgacgtgttatatttgcaataaacccaccaattgcagcttttgaacttgaagaattattaccaacaattctaccaggaacaactctatttgatttaacaccatttggagtttgaaataatctaccctttaaagtataacttaaacctgcagtacctgataattgattataagcattttcaggaatttcatttttatttgcattatttgataattttaaattttcagattcaataaaagatttaaaatatgatgataattcataattattagtaatttgaatattattaattgttaaccatttaaggaatggttttcttaaatttttcaattcaggtttaatatttttaataaaattaattgaatttaatggttgattagtaatatctaaggtaccagaaattaattttgattttgaaaattcttttgaactttcaaagagaggattttcacatttaagtaaagaatttaaaatatcaggatcattattatttgaatcattactattattattattattattgttgttgaaaaatctttgatttttattattattaagattattattattattatttgaattttcattatatgaagcatttacaggtatacctaattctctaaatcttttctttaagaaataatcaccattaagagtttcaaaatttggtaaaccatatttattatctaaatcattaacaataattcttctagttttaattttttttggaattctcatctttaaaccgaaatctcttctagagaatgaatcagttggagcttcaataatttgatgagttggtaatgaactatttgcatttaatatactatcaccaattgaattttgtaattgaggaattttagtgtttttaaacaatctgcccataacggacatacttcctgtactcttggacattcttgagggggtgatatataggactcagaaggggagatcaaccacagattaatgaatattataaatacctattcctctatatatctcctacattgaaattgaaaaatcatgaattgagagagagagtgaaatttaatttttgaagaagagaaaatctcaaggaaagttaccctctctttaaaatttaaaatgaggaaaagtagacgcatcgacgcagagaaagagaagagggcaacttgcccttttttaaattattttattttacgttaaaatgctcagccgttgatttaagtgattaggttttagtaaggagtatacacttcttgatttgcttttcaaaaggtatcagggtatattcatattaatcaatacatacactggatcagatccattaaggaagtagaggagttgagttgagttattttatctacaaaatctattcacaatctttcatcaatgtcgtctaagaagagcgtttctcaaaaatataaacttctagaagtcattggtagaggtaaatttggtacagttcataaagctatcgatgttgatagtaaacatttaattgcaattaaaattttaaatttagatactgataatgaagaagttaaagatattcaacaagaaattggatttttatcaaaattaaagacagctccaaatataactcattattttggttcttatttaaatggtcataaattatggattttaatggattattgtgctggtggttctgttagaactttattaaaacctggtcctttaaatgaaaaatatatttcaattatttctcgtgaattatttattgccttacaatttattcatgaaaatggtgttattcatagagatattaaagctgcaaatattttgattagtaaagatggtaaagttaaattatgtgattttggtgttgcagctcaattaacttcatcaaaggtaaagagaacaacaatggctgggactccctattggatggcacctgaagttataagagaaggtgcaacatataattcaaaagctgatgtttggtcagctggtataactatttatgaaatggcaactggtaaccctccctatagtgataaagatgcattaagagtaatgcaaataattactcaacatgaacctcctagattagaaggtagacaatatagtgcattacaaaaggaaattattgctctttgtttagaggaagatcctgaattaagaccatctgctgaaactatattaaaatcaaaatttattaaaagtagtaaaactttaccaactacaacattaaaggaagttattggtaaatatttggtttggagagataatcgaaataaatcaatttcacaacaaaataattcaaatttaagtaatacaaatttagaaaatgctaatgtcgaatcaaatagattaaatataccggaaaataaaatctctcatcatcaaactccttcaatggtatcattaagtgaatcttatataagtatggatgatagtgaaaatattaaatgggattttgattctttaaaatccacagaatatattattgaaaatgatattgtattacaaaatgatgataattttaaatttgaagattcagaatttgatattaataataatcatgcaacaaaagattttacaagagattttacaacttctccctataataaaactttcacaattggtaatactttaatgaatggaatacataatgattcaagaattacaactgcttctggtacagcatcagcatctacaactcagatagattcaattattaattcttttgatcaagtacctaaaataattaatccacctaaatcacttgttgatttattccccgaatctagtagcaacaataataataacactaatagtaacaatatacatttgaataatacaatcattgatagaaacacagataaaaatataattgataataatgatcatccaaatggtttcaataataatgaaagaaaaaattcaagagttgaaatacagaattatccagaaattgatcataatggatcatattatcaacataatgatgaattaaagaaagaactattaggaaataattcatcatttaatcaaatgagacaacctcaaataacttctccattaatttcgattgaaattccaaatatggataatattgaaaatgaaatccaagaaagggaaaagcaaagatcaagagctgcaaccgtaactctaaacaataacaacaataacaataataatagtaacaataatatgaacattaacaacaataatattaacagtaatagcaatacccatattgttaatccaattgataaacctgatctgggcacacatttaagatatgaatctgatcaaccattaccaatgagaaaaccaacaatttccttagcatacaatagaactccatcacctgcaaggatgttagaacaaatcaatacaaatttacttcctaattcacaagaacagacaagtccattacatatgaaaccattaccaattagtgctcaaccattattacaaccaataaatggaactttaaagggtaaaccacaaattaatttatcgaatatttccaatcataaagcagtttcaaataatggtccacaaactgctcccgttgtttcatcatcgaatgctgaattatttgattctgctttaaaatcacgtaatcaaatgcgtatacagatgccagtacctatgtcagcaactgctttatcattcccaaacataaattctaataataatattattaatagtaataatactattgaaaaaaatcaatttggttttgaaattaattcagcttcaactgttccaatggcaatgacaccagttactgaacgttcacaacttggtcattcaacacctgaaaaagaattatataaaagagagatttcaactgaaggacattttaataattcgaattcaacaaattcatcattttcattaaatactaatacaaatacaacttctaaatcaataaattccgagaatattatgaaaaatgaaccaactataaagaagattccatcaactacaaaacatgtaattagtccaagtagtaatttgaaaaatagtgtaaaatcaaatactaatatttcaaatatgaatataaatatgaatttacttggtaataaattaaattcggcgagtgtttcaacattgaattctacaaataatagaaataatgattcaacaacaaatcttgaaagaaagatgtcagttgactctaatcttaaatttcaaccttcattaatatacccacagcaattaaaccaacaaaacaacgaaagtgaaaactctaactcattttctaatctaaatgatggtagaaaagataaagataaagagaatgataatgaaaagactataactggattaggtatgatgagaatcaatgatagtggtaatgtgtcaccaatgaaggcagcaagtcattatgataataaaaaggaatacacattacaaaaatgtgtgaaatcatcccaaaagagtttagagaagatatccaatcattgcattactttcactggtattgagacgaacaatacgttatctaatgcattgtacatcaatgaaattgagagtatgctggacaacatgaacagtgtattggatgttatcgttgatgaactaaaatagggtatccgatatgcgacaagttaaataatttttttgtgtaaaatagacgaaaaaacgggtgttttttgaaaatgttttttttctttttgaaaccattcagattatgtaaatttactagattaacattaataattctaactgttttaagaaactattcttcttctttaattgatgataaatgatggtaaaattggggttattttctcaactgatttaagaaatgatgatacattcacccagaggaagttatacacacgattggagttgaaatcatctgaattgttgaattacgagtttaattttaatgatccattgtatgaatacgttaataatagtaaaataaccttacaaaatactgatgagatcaatatttttaacaaatttaacattgagttagatatattagaccctcagtttaatgatattgtacaatatcatgcagaaattaatgagagtattattgatcaaataatgaataataatttattaatagggattaatcgtgaaatagttattatatggatattaggattgttaattaatggtaaatatgatattgaagatagatataaatttgaaatatttaatgaaaatggtaattattactggaatattcgaattttcaataatggattatttaaaatattaacaaagattactttaaataaggtagaggttaatttagatgatgttctccttaaagatttagaatatttttataatgaaaataaattatttaaaagtaaagaaagagattgggaattagaaaaggaaaaatttgccaaaaatatatttttaataaaggagaaggaacaattgaataaattaaaagatagtgtaaggaagatgagaatgcaaattagtgaatattttgtaccattggttaattctttattaaaggagaataaattgttaaagggggatactggtgatgttatattttcaagtaaaaaaagaaagaatgatatagaagagatgaaacaagaaatttttaaagaaatggaaattggaattaataataataataataataataataatgaagatgatgaagatgatgggggtaagaaagataagtttttagaattggctcgtaaggagaagaataaaagaaggaagttggaaaaggtagagaatgaaaaagtagaggaggtaaagccaaaagaacacgttaaagagacaatttttgaaaataatagtaatgatttagaagatgatattgtatttcttaacaaaagagaacatcatagtattacagagacacaatctgattttataacggctaattgtgaagttaatgaaagtatacaattaattacattagaaaatgatacacagattgatgacgatgaggatgataatgatgatcaaaatgaagatctttatcaagatcttgatcaagaaactgatatttctgactatttaattgaagaaaacatagaatctgatgaaaaaactgattattctactgaagtatcctcttcaggtaatgaatttgattaatataaaactgaatggtgggtatatgagatccatcttttactataactatttttagaaacatattgaatatttttaccaaattttaacagaccagctgatttattaattgatgatatctctgatttaaaatcaattagatttaaccaaggtttattaaaattctcaattgatatattatttggtaaaatattatcaattatattattcatattaggtaatggatcatttcttggttgtaaatcaatcattgaacatattttaaatcttgatattgatgctaatttgattaaatttatgtattgagaatctatctttttgaaaatattggaattttgtaatgattcctctaatcttaatttaaataatgaatcaaataaacaattatttgatatacatccaatacattcaatacattcagcatatctctctaataggatatcatcgaatatatcaatttctaaatctgaaatatctttaaatatattgtttattcttattgaattgatttgagcgtatactaaaaggtatttaggattagttctttgctctctcatatatgtagttttaccatttaaatgaattggaattcttatattaaaatctggaagggtggaattgatatttatattattgtcgtattgagttggtaaactttcgaatttttgtgaaaatgtttctaatggtatatcttgaaatattttcatgttattgaaatgattggaaaccgaataagttaagttaaatgaattattaaaattatgaatacaatctgatattgaaaatttattatcattattattgttatcaattgtgggtatactaatggtatttgaagaattatttattaaactatttgtgtgaagttcaagtgattgattttctagttgattggtattatcattttgagtttcatattcattattattatcatcataatagctgttttttcgtgtttgaagaggatgatatttatcctccgttaggggacaaacgggtgtaaaagaagatgaattcgataatggatcttcaccattcaatatgaaacttttttgaaaatttgaaaaagaactagcttttttcaaagaacaagtagatttaaatgatggtgttataatgggggatattgaagtatcattataacttgaaactgaactttgtcttgatgaaagcatttgtgtataagaacttgaaaaacttgaatgtgaagtacctaaactacttttccttcctaaagatgtggctgctatgttgctaaatgtgaatatattttcatcctctataatattttgtgataaacctttcctattaggtttaacacttatctgaatgggagatacttccactattggtgtgggtactttaactattccctccatggtgtccaagaaagaaagagtgaacaaccaaccagtatcataactctaagaatactatacctataatcggaaaacttccccgagataagcgacgttgagatcggaattacccaactaagaaaaagaaagacgccaatgcttaaacccgcactctaaaacgcagaaaagcttctctggtgctaatttagtgccattttcagtgaagtagtgcttcgttaacggttttttctctctagcttgggtttatgggtgttcttcgtagagtgttgttgaagagtaaggacactgatgataggattaaactaagtgacacccatttcacatttcccaagaggaaatacggtactcaacagaaacaaataggtcaaggtgtctctggatttgtatatttatatcaaaatgagaaatccaacaccttctatgctgttaaatcatttgaaaagaagaatttgaaagatgttgatgaaattaaatcaattaacaaggaaattgatattcataatagaattaataatggtcctcatattgttaaattaattgattcatttaaattaaagacaaattctaaatttttcataattatgcaatatttaccacttaatttacttgatttatatttaaaatatggatctttaatgccaatttcttacagattatgctttttcaaacaaattgtattaggaatcgcatttatgcataatcaaaacattgctcatagagatattaaacttgaaaattgttgtgttgataacaatggcaatgttaaattaatagattttggttcttccactattggtgatattggttatggtatggcaggttcaccctcttattcttctccagagatacataattctttaaaatataattcaattaaatgtgatatctggtctctcgggatagttttaattaatatgttttatgcatctaaacaaaaatggaatacttgtagatatgatgatgaaatcttcttatattatcaaaataatccctctattgataatgctgttaggtttttaaataaaaatgataccaataatgttaaggagtatacttcccaaaagaccttaatcgatgatataatcttacaattgttgtccattgatgtcaatacaaggatatctatacagaaattattagaaaataagtggtttaaggagacagagtgttgttatcctgataatgatctatataaggcttaccacaatcattcacagtttgtataatagtaaaagtaatagtaacagtagaataatgatagatataagccatgaagtaggcgtaaacatggtaacaggttatttttatagtctcgaattgtcatacaatataattttattattttatgttgatgatctgttgatttatttcatttcattcagtaaatatacgtagtgaaagtaatggccactgctacttctagtgctgatctattgaatgaggataaagttaaatccattctagcatcagattcaagttttggaatcttatcccaacgtttaaagcaaagtattaaagcttgtgatgaatttgcttcatttattgctagaaaatgtcattctgaacaaagatattcaaaggatgttttaagaactgttaatcattgtgatcattcaataacttcaaataatattgtagttcaaggtacttttattcaaaatttacaaaaagttataaaatttgatgaaaagataaatagtgttagagatccatatatctccgcattacaaaatatggcaaatcaattggaatctttagttcaacatttcactaatattaggaaacaattaaaggaaaaaggtaataaggcagagagagaagtttcagattctattaatatggctaaaaaggctagaaatagatattggaatttatgtactgaattagagaaagttagaggttctgataaaaatcaaactaaaattactttacaaggtcgtaaaacttattctcaacaagaagaagatttaaaggctaaaattaaagatgctgaagatgattataataaaaaagcaaattcatctcaaagattaaaaaataatttagttaaaacaataagaccaaatattgcagatgaatttaaaaatttaataattgaattagattatgcaatgcaaattcaacttcaaaaatattcaatttatactgaaagtttaatagttggtatgggtaatcaagttaatccaattaatggttcggattcaatgaaaaaaattgcaacaagttctgatcttgaaaaatgtttatatttttatttaaaaggttcaactgttaaaactaatgaggctttacaacctgtggaatttataaggcatccaattgttggtggtatattaccaaaatcaactccaaaaccaccaaattctgctaatgcatctcgaattaataatattaataataataataataataataacaataaaagggatatgtctattgcatcaaaatcaacagttggtggtgcagcagcagcagctggaatggttgctggtggtttaatatcatctacagtttcatcacctaatggttctgttaatagtaataaacaatcacaaaatatactttcaatgaacactaataataaattaccacaaataccatcacttggatcaacagattcattacctcccgttccagttccaccatcttatacatcattagatccttcaagtagtccaaaattaagtggtccaagaccattaaatttagaaggtaatgattcaacattatcatttactgataatagtattaaatttaattcagatatttcaactaataatattttaaataatgggaaattatttggaactccattagaattattagatgcaaatgatgaagctgttccattatttgttattaaatgtatacaaataattgaaacttttggatcaaatactgaaggtatttatcgtttaagccccaataagatatcacttgaagaattaattatacaaattgataatgatccacataatttatcattattagatccaaaggatccaactaatgtttcatctgaatatatttatataattgcatcattattgaagaaatttttcgctttattacctgaaccattattaacaaatgaacaacgagaagcatatttacaggcagctgaattacatgatccaatagagagacaaacaaagatacatcaacttgttttcgaattaccagattcaaattattttacattaagagatattttaggacattttagacatttaattgaattcccaaaagttagaatggattctaaaaatatttcaattgtttgggcaaataatttaattggtggtaattttgaatcaagaggggaacttgaaattcaacaaagagttattgaaaatttaattacatttgcaccttcgattttcacttatgatgacatttaaattaaaaaaaatgttctcttatactatgtatttataaaaaattctattattattattaatagtattatataaaaacactttaattaattatcaatcttacgtttagctctttcccaagcactaattctctttcttttctttggttgaccatcattaccaccaacactcatattattttcaaacatactccaatcttcaccaaagaattcattacgcattctctttgcacgttctcttttattttcctttgttttagttgcaggtaatcttgtaaaattttcttcttcataacgttgtatctctgcttctttctccatttgtttctttgatttaatatctctaccattatttataattgttgaaccaatagatttatcagcaattggtgcatcactaatatcttgtaaatattcatccatactttgtaaatttcgttgttttttacttttaactggtctatctggatcattaattgcagttgctgcaatctttggtggtttatatttttcattagatttatttgatttaagttcttcctctccttgttcaagattagtttcagtttcatgttcttcttctaatttagcttctgccttctttgcaatcaaatgttgtttattactatacaataaagcggatggatttggtttgaaattcaaaccattttcagcttcttcatcctcttcatcttcttcatcgtcatcatcttcttcctcatcttcattatcttcatcattatcttgttccttcttctttgcatcaatatcatcttgttctttttctcttctatgatatgcactaaccattttttcaagttgataacttgttttcttttccaatgctttgatacctttctctaaaacaatacgattagttgcagcagaatttaaaacatcttctttatttgattcataagctgagtcgcctttttcctctttaaaagattttaaacgtaatgaaaggtataatgctaaatcagtaacataattaagtaatgaagcatttttcaatgataaaagtgaaacagaatctaaatctgaatctgaacctaatgttttcaatatggattttattaattttggaacttctttattatctggattgaaatcatcttcaagtttatctaaaactagtgatgttgaatctatagattctgcaattgaagataaaagatcatccaatactacgggttgttgtgattttgacatttccttcaataaataggatgtatgatgttgaataaacccaagaaactattacaaaacagtaaataactatattataaatttcacaataatcattaattataattctcttagagacaaaaaaaaatatttgaaatttcatgttaaaaaaatttttcttttttaagaaattttttaatcaaaattttttacttagtgatttctattgattaaggtagttagaatatttctattttattgtcttttctttgattctttcaccttttaagcaaatagatatcaatcaaacatgcctcaaaacgattatatcgaacaacatatcaagagacatggtagaagattagattatgatgaaaagaagagaaagaagcaagctagagaatctcataagatttcaaaggatgcacaaagtttgaagggttggaagggtaaacaatttgcaaagaaacgttatgcagagaaggttgctatgaagaagaagattaaagctcatgaagaaagtaaattacaaggaccttctaaacctaaggaagatgatggtgaagcattaccaacttatttattagatagacaacaacagaacactgcaaaggcaatatcatcatcaattaaacaaaagagaatggaaaaagctgataaattctcagttccattacctaaagttagaggtattagtgaagaagaaatgtttaaagttattaaaactggtaaatctaaatcaaaatcttggaagagaatgataacaaaacatacattcgttggtgaaggttttacaagaagacctgttaagatggaaagaattattagaccttctgcattaagacaaaagaaggctaatgttgttcatcccgaacttggagtaactgttttattaccaattttatctgttaagaaaaatcctcaatctccaatgtatactcaaatgggtgtgcttacgaaaggtactattattgaagttaatgtctctgaacttggtttagttactgctggtggtaaagttgtttggggtaaatatgcacaaattaccaatgaacctgatagagatggtgttgttaatgctgttttattagtataagacaattacaaatttcatttatcttctctctctatctatatctctttctatgtacatgtataagtttgaattttaaatccggttaagtttttactatataagaaaccaaaaaaataagtattaaaaagaaagttattcgttaataatctatcttcatcttaactgctaatcaaaaatatctttaatacaagagcacggcgggactcgaacccgcaaccatccccgccggaagaagacatgctaaccattgcaccacgcgccctcgtacacagcccgggaggtcatttaagacataccctcaatttttcaacttagcggtcacatgatctatgtgattatgtaagcagattgatgatgatagtgatgcagctgtatgtaaactaataaggagttttctgttttaccaggttaccgtaaattttgtgatcgccagctaagccgcacatagccagacgctaccagttacttgttaaaatgctggcttaatacaattgtttatgcattatttgagacactatttctagtcttctttctctactactgcttaaaatgaaatattgtagtatcatatcttataattgaggtgaaaatataaatttgtattttaaaaaggtgtcattatttggattagtgatgaataactaaaactagctcaacttttttaaatttgaaaaggcgtagtttgaatcaacttttttatttctttaaaaataaagtttacgtttcctggcatccctgaattcacttgattaatatatttttgttaaaagttgtgtatacaagaaatccgttctaatctagttacttctattataaagtattttatataaaatacataccagatataatgaaatatatcttaagtgaaaaacttttcacttgaactttctcgacatttatgaatgtctcattatgtacatgaatgcacttcgcggcacttcatgggccacttccttgcattccaccagctcagtaaaccgtccggtctattcagtacctctgacctggaccactactttcgataatttttcaataaaccccaacaaaattgaacattaatcagctttttaacttttaaggaaatgaaaaaaaactaaactgttatattggaatgtattaattagccttcaacaataaaatttagatttgacacatataaagtaaaaaatacttcataaacatgctaccaataatgtttttttaagaaaacgtcattatttttataaatcacgtgactacaataaaatctatctgaaaaagtgttattttttattgtcaataattggttgtatagtgtagtggttatcactctcggttttgatccgggcaaccccagttcgaatccgggtacgacctttacttttttgaagtcctttgttttattttttctacctattgttagcaaaaacctctgttgtttaattaaaccatttaaacactttaacatttactcgtatagtaacaagagattaatcacagttgaagaaatcagttgtagaatttgaaaaaaatacaaaatttacgtgtctttaaactgtttgaagattaaagtgaaattacgcgatttgaataatcaacatgagttaaaaattattgatttattgattgttttcactagtgacattaatgaattacttttggtatgttatatagatgatattgaattggagttaaataatagaatatctacgaaacaatggagaatagtaacaataataagaaaagaaaagaaattgaagaagaaaatgaggaagaaggtaccgataaacaaccaagattatcatttttctataattcaagtgcaattaaaccaaatattcaaagagagagggcattagatgaaattgatagagttgaacaattaattacattaaatttacaaaaaataaatgaaaatttaatgatttcgaataatgttataagtagtaaattaataccaacattagaaaaatttaattcaagttcaattaaattatttaataatattaatcatataaaagaatttttcgaaaatgcagcaaatgttaatatattaacaaaaaaagatgttaagttttctgataatgaaaatgagaatgatggtaatgatagtaattatttacagttaagatcaagttcatttactgaattaaaacatgatagattaactagttcagataataatttatcacaaagtagttcattagtaagggttaatgatgataataacaataataacaatgtaaataaagaaattattgaaccaactatatcgaatatgaataatacgagatctttgtttgatggatttaaagttaatattgatgaagaatccactggtaaaaatccagtacaacgtaatgttaatgaaagtattgatgatgaagagtttttcactataaatacattcaaatctgatgatgagtgtagagaatcaaatgagaaagagaaagagaaagaaaatgaaaaggaattagacgtagaagaagaagaagaagaagaagaagaagaaggaggtattgagagtgaagataaatctaataaatttgttaaagatttaatgagtggatatgaatctccaccatgggaggaaccacccgttttacaatctgttagatattctaaacatttacatcataaacgaagaagtgaagaaacaggaatacgatcggatgaaagagaagaaattaataataataataatgatgatgataaagccagtgaatacaatgaagataatgaagaaagtgatgaagatgttagtataaggttcccatcatcacctaaatatggaggaggtggtaaattattaagatctaatgaaggtagacaaattgcattagattttgcaagaagtgaaatgatgaaagaacatccaatactttcattacaaagagatagtactaaatctaagatagcaccaattagaagaatgcccactgccagtgatccatttcgaagtgatatagatgattccagcagttcatttgaggatgtaccggtgttagagagtgaaaagttacctaaacgatatcgatgattacgtaagttattattttttaattggggcacattaagtcattaaatttgtaaaaaagtgagaggacccctttatttttcatttgcctttgtatttaactttctttctttcttttctttcttttcttttaattcttttagtatacagccaatgatatttcaaataaacaacagacacaacaaaagaactaactttaaaaacaactacactgttaattcagttttatatcacctttctaataattttaaaattttgttcatttcattattactaatactgacaacaggttacatcatatcagctcatataccatataacaaacacccgtcattatcttatccactgtctcaatacaatgtggaagaattctcaatgagtacacattacagtaatcattataataccaataataataataataataataataataataataataccaataataataataataataataataataataacaacaaccccgattctttccccaagaatcatcaaactacaacaactacaaatttcatgaaacctacagatactaataccgataattcacatgagagtatatcctctttcaatcataacaatgtactaatatatggaccatttgaatctcaaccaagtacacattttgaactatacaattttaactcattaatgttagttgcaatactattcatatcttgtttcctattattatcctaatcaccctaaccaaaacaatcaacgtcatcaactccgaataatcaacaacgttgccaatgattcatcaataatcaatgagagacccctgataattacccgtttaggaaatccgcaccgcttcacaatagatttaaaatatttttttttgattcgctatctcttacccttcactctttagtagtgagacacttttgcaatattgcaaaacacatcagttacaggtaatattacagcacacaagtactttattggttaaaagaggatcaacaaaagtgaacacaaaattgtcgacgaatttcaattagagaaaaaagacaacacatattattttcattatatttccagtattatatattccttatctataatttatcaagatggattataaacaagttgctatcaataagacaaaatctttaatcaatagtattccaagtgaatggttattagataaaattccttcaccagaggaacaacctaatgtaaatgaatatcttgattcaattttacctgaaaatgaaaaattagttacttcaagcaatgcaaatgatttattacatttacaagagattggtaaattaactgcttatgaaattacttatgccttttgtcatagagctgcattagttcatcaattaactaattgttgttctgaaatttttttcgataaagcttttaataaagcaaaagaattagatgattatagaattaaaaacaataataaattaattggtaaattacatggaattccaatttctttaaaagatcaaattaatttacctcaaattactacatcaattggttatattgcacctcatatttctaaagaatttgaaaaaattattacaaatagggatgaaaatcaaaatgatatttcattaattgctgaaattttacaaaataatggtgcaattttttatgttaaaacaactgtaccaatggcaatgttaggtggtgaaacttcaagtaatttaggtacaacattaaattctattgatagaaataattcatgtggtggatcatcaggtggtgaaggtgcattaattgctggtaaaggttcaattattggtattggtacagatattggaggttcaattagaattccaagtgcagttcaaggattatttggtttaagaggtagttcaaatagattcccatatttaaatattgcaaattcttatccaaatcaaattggtgtttgttcagttgttggtccaatgtgttcaaatattaatgatttaattcatgttagtaaagttattttaaatgatccattatgtgttcaagatccaagatgtattccaattaaatggagagatgatgatgaacaagttaatgataaagttactaatattggatttttaagatgggatggtgaaattttacctcatccaccaattcttaataatattgataaagtttacaatattttaaatggtaatgatgattttaattgtcaaataattgatgaaaataaattaccagttaaattatcacaattaggtaaattactgttaagtttttataattgtgataattttacagaaatttccaattattgtaaattaagtggtgaaccattaagtgaattatttatgagaagttttaaatttaaggaagataatagaatggataatgttgaagaatttttcaataaagttaaattaaaatatgaatatcaattaaaatttgataaattatttaatgaattaaatattgattgttttattatgccaagttattcaacagtttgttggaaccaaggtgataataataaaatttctaatttttatacaagatcaattaatgtattagattatacagcaatgacattcccagttggtaaagttaatgaaaatgatgtatcatttcatagagatgatgatgaatttattaatgaaatggatggaaataattggaaatattttaatttagataaacaattaggtaaaccagttacattacaattaatttgtaaaagatataaagaggaggaatgttgtagaattgttaagaagattattgaattgttataatatttaaataagtagtttaattgtttaaatttttaaatttttatacacacataaatacattagataagtagacataatataatataatataaatgataattaataattgataaattaattagattttttttcatcagaagttatataaactctatcatcaattttaccttcaacatcagatctaatttcatccattaattttgattgtttttcccaagtttttttatcaattcttttatctttatcaaataattctgcatcaggttctctataagaaccacctaatctatcccataaagttgtaaattgaccataattataattaaaataaagatgatgaattgtatgacaagcagcaccattaataacaggatcatttgataaatattcaccatcatgaatcataacagtccaaaaattaacaaatgtaaataataaaaggtaagaaattttatgtaatgggaaaaaaaatgggaaccaatgataaggtaatgattggaaataaccatcaactggatggaaagcatgagaagcaaatggtgtacaaacaatccatttatgatgaggtttatgtaattttttataaattggaggataatgtaaacctctatgaataaaataaataccacaatcagtaaataaaataaatgaaggtaattgccaaaaaattgctgaccaattaccagttgaattatcaatattccaatataattttgaataaccatgaagttcaagtaaaaaccaaggaactgttaaaagaaccataattggtatagcagttgaagcttgtttaatttccatataaatttgatttttcaaatatcttggatgattaaaattagatttatcataaacaaatgtgaatgaaatccaagcaactataaaataaagtaaccaaccaaataatgaagttacaaggaaaagtgaaattgtttgtcttataaaactatatcttggtaataatgataatttggaataaattgtttcatttgggaagaaatgataaattgcattataaccgtaaatttcattttcattcttatttggtaaaaatgaagttaatttattgaaaattggattattatttaaattttcccaatttttatcaatattggaaatagctgatttaactaattcaggagtttcaggtatataagattcataagattttggtaaaattgttgcataaactttatcaaagagataagtatctaaaacttctaatattaaatccattattgactgatttatagattgaagattttaaatttagatagtaaaataattaataagaatgagtaagtaaaataattatcaataataagtaggaatattagagataagttgaagtatttatagaaggaagataagtagtttaaaatgaagataaaccagttaaataataaataaaataacctgataatactataggaaaagaatgaaatgataataaagtatcaacattaaatatttcaattatgaaatgataataaagagatatttttttcaattttcatgtctcgcttttttactatggggcgtttttttatatggcttatacgatcgtatagtaattatgtcgtatagaggttatacgatcgtataatttatttgtttaatttaattcaccgataaattccggattacgtaagtgagtgtattacgtaagtaacaattgacgtatcgacccttctattagataaggaaagaaaaaaaaaattttttttttatttttcttttttttttctttatttacttaaaaaaataaatttttcactattataatgcattaagaattatcagatctctttactttactttactttactcctctctttaaggcgagcaattaagcaaggaaccctcatcaatactattataaaatgtccgctgttaatccaaaagctttcccattagcagattctgctttatctcaacaaattttagatttagttcaacaagctcaaaatttaagacaattaaagaaaggtgcaaatgaaacaactaaaactttaaatagaggtatctctgaatttattattatggctgctgatactgaaccaattgaaattttattacatttaccattactttgtgaagataaaaatgttccttacgttttcgttccatctaaagctgcacttggtagagcttgtggtgtttcaagacctgtaattgctgcttcaattacaactaatgatgcttcaactattaaaaaccaaatttatggtgttaaggataaaattgaaactttattaatttaatttaatctaagtagtaaatgtactctttatagaatataataataataataataacaataaccaatcttacgtaatatgtcccggagattctagtctttaataaagcagagggaggggagcggagaaataggaaataggaaattgtgaatttttttgacatgaattgcattgtattatgattcatttgcaggtgttttcattatagaggggattaccgtgttcggagttgttgaatccgttgaagttttcttatcttagatctcagttattataaatactaccctattgtcctacttttatctgtaaatcagttattattgattatactttttatattaacaaacaatgtttagacaatcatctagagtaatttctaaatcttttaaaaattcaaattcaaatttattcatctgtagattaaattctacaaaagtttcaccagaaccaacagttgaatcatcaacacctaaatcaacttatagagttaatgattattccacataccctgaagattcagctgatgcaacttcaacaatccttgcagatgcaatcgatttccaaaaaagaattcaattaaaggatagagttacatggtgggaaattttacaaaagaaaaatttaagaaagaaacaaggtaaaaatattgattcattaacaattgatgatgttaaaacaaataaaatttttgaaaagacaagagctgattctttctcatatattactttaccatttaaagatgatttatcattaagagatttttatattaatgcacctggtagattgagatttggtcatttatttcaagatttagattctttagctggtagagttgctgctaaacattgtaaacctgctgaaccaatgaatgttaccgcttcaatcgatagaatttatgttacaaagaaaattgatgaaattcataaatataatttcttaattgtcggttatgttacttatactggtaattcatcaatggaaatttgtattaaaggtttctcatatgaaactaatttaccaaatgcatctgatattaatccttcaattgttgaaaatcaatcgaaaaattgtttcctttctgctaattttactttcgttgctagaaatcctgcaactcataaagctcataaaattaataaatttttaccaacttctgaatttgaatgggttgaatttaagagagctgaatctcataatgctgcaaaaaaattaagagcaaaattaaattctcttgataaagtaccaccaactgcaaatgaatcaaaaatgattcattcactttataattcatcaaagaagttattagaaattccgaaaaatgatagaccaaaaaatatttattttatgaaagatacaagaataactgctaatcaagttcaacaacctcaatatagaaatagacatggtattatatttggtggttatttattaagacaaacttttgaattagcttattgtgcagctgctgcattctctaaaagttacccaagatttatatcattagataatacaacttttaaagctcctgtacctgttggttcagttttatcaatggatgcagaagtttgttatactgaacatattcatgaaattaatgaagattctaattctgctaaattagtttcaactttattaaatgattttgatacatctgcaaataaattaagtttagattctcgtgaatttttatcagtacctggtacattaattcaagttcaagttaatacaaaagttcgttcacttaaagatgcttcaaattttactgaaagtggtacctttgtttatagtttttatgttccaagagatattgattcagttgattcaccaggttattcatcagttattccagaatcttatcgtgaaatgatggattatgttgaaggtagaagaagagctttcgatactgctgcttatgcagaacaattaaaattatatggtgaattagattaatttaagtatagtaatgtaattgaaaacgtatataaaaatttaaataaattaataagaaataaagtaaagtaaactagagtacaaagcaaaaattaaaaattaacaaaaaaaaaactggaaactgaaataaatctaaaatacatgtgcatatcctataaggcatcttcataatcatcattacttaaatcaaataattctgctttataagatttttcttccctttgaattttccttgataatgaaccactattctcaaatccaactaattgagcttcagatgacatcgaattatatgatgtatctctagagattttattttcatcttctcttagagtttctaaattattattgaattctttactactattataattataatcattaaataatgaatcatcacttggatttgaatttcttaattttgataatttggggaaaatcatttgacttttccgtattttatcatcattaacaacattaacagttaataaatcatttgttgaaactgtaattaatgaatttaatgaatctctagttttcaaattaccatttgatgatcttctccatgaattaaaaattcccgttggtttgatataattattattgttgttattattattagtatttattaattgatcagtacttgtatattgatctgcaacattatataatttatcagttgttgccttttcacttaatgttgaatcatttgctgaataatatgaatcactatcactacctttctctaaatcaactaaatttttttcagctaaaatacgtgcagatgatgatgatgaatttgatgaactttgtttacctattggtgcaggtataattggtggtaatgatgatggatcttcatcattttcattatttttcttgtttctacgttttgcacaacaacaaaagtaaaatattaaagcagctgctattatgaaaactattggaattgcaacacctaatccaattgccaaacttttgttacttgtatttgatgatttatcaacaataattggaacagcggatgaactagttgatgcggaagatgtggttgatgttgttatagtatttgaagatgaaacggatgatgatgatgaggatgctgaggagtttaatgatgaatgtgaatttgaacttatataagaagacattgatgatgatctcgatgctgatcttgatgaagaactatgaattgttgaagaggatctataacttgatgaactacttggattaccaacaatataaaaacttaatgattgtttcatactattcattgaagcatttagttcaatttgtgatgaattaaaatcgtttggtacattaccaataaatgtattatttgaataataaaaagttaaccaatcatcgttataaattgcatcaattttagtttcatttttattttggaaaattgtgtcaggtaaagtatattggaaaaatttcccattttgaacagttatattagaaattgaatcaacattgaaaattttatgtaaaacattaatttcataattcatgaaaactgaatctccataaatatcagataatgtaatattaacaactgtattattattttgatcattggggatagtacctgataattttgaattatcttcaatactaatccaagatggtccattaataatattaattgtattaatttgattagtttcaataactttattatctaaataaatatcatttaatggtaaatcaatttcaaatttatcattaggatttttcataattgtattattataactagttgtattttgaatataaagactatgaccaccaacaattaatctaaaatctgtataagcagctgaaaatcctgaataatcagttgcaattaaagttaaatcaaattgtaaacttggagcattaattgaattaactggtggtgaagtaccataaaaagttaatgaattttcatcaaagaaacaccaacttggtaaagaagttctatttgcacttttaccataatattgaataattttatttgatgaacttgaaggtacaataaatgaattatcattaaatgaaaatttaaaagattgttcaggttgaataactaatccattattaccatttgtattacccattttaattaattgagtaattattgaattatcagggttattttcaatagatggttgatttgataaataaattgaacaagattgattaagtgaatcttcattatcagtaccttgtaatataaaatcatatttaccttcatttgaatttatattattaccataaaaagttaaagaattttcatcaaatgataaccaatttggtaattcaaaggcttgatatttaattggagaattattatcagatttaaaagtttgtgaattaattgtaaataaataattttcacctaatcttgcaatatcaggtaattgattattaaatgggaaaccattataaacataagattgaacttgatgaattaggaatgtcactaccagtagtaatgtcctggctagagacatgtatgtcatgatcatttatatatgacttttatctagtttttgaatttatgtaagggttagtctttgattaaaaagtagattaagacaaaaaaaaggatgtaaagaaaatgtaccaagaaaaggagaaggataggagacaaaattagaatatatgagatactagtattattaagttggaatacatcatagagataataataatttcaattaatttgatgaatacggacatttaattaaaattatgacatttataaatagagacgcgttaataatgataataataataacaaacgcgatatttaaagacattgaaaaatttttaaggggttgagaataataatcgcgtttattacgtgtaagtattattataaatattataaatagtatattacgtaatactgtcacgtgataattacgtaatattattatctatgacatggtttgatgttgtgttttatttttattttcaggtggtcgatgcgtcggggtattatttttctgtaagtttttttaataatcattggtataagaaaggagatttaatattaagttagtattctagtgatagatggttaataatatacaaacaggtaattaataatgggtaatataacatcaacatcatttgcacctgaatgtaatgaattaaaacaaaaatatgatacatgttttaatacttggtattctgaaaaatttttaaaaggtaaaggtttacaaaatgaatgtgaagatttttggattgaatataaggaatgtcttgatattcatttagctaaacaaggtattaaaccaatgttagaagaggcaaagaaagaattaccattcgatgaaaataataatataactgattctcaaatacagtctgagataaataaaaaatccagttagttttcattttattttattttattttatagaaaatttatatattccatatcatgcatgtacatatactaaagataatcatcaaaatcatctttgaaatctgctaattcattattcttactcttaataccacttctaacttcctcctcttcatcttcttcttcactactttcttcatcactatcatcatctcctggttgtgcaagacctggggtaagtcctttaactgatatataacctttagatattttatcattaaattcattaattctagcatttcttctcttatttgctaaaacttcttcacttcttaattcctttaatttattctttgtattttcaacttttgttaattttaaaatatcattctgtaattctaataaatcttcatctttattaactaaatcttttttctcaatttgtttaactttactattaataatatcatttattaaatcttcatctttattaattaatttactttgtcgtataattttttcattaatttcttcaactttctttaattgtttacttctaattaatctctcttttcgtttaaatttctttaaatctgttaaattttctctaaatttacctaattgtgaattcatctctaataatttactagctttatgattaatactatcatttttcttacctttatcaagttttttcttacttttgagaattttcttatcagttgtttgtaaatatgttgaaagtaaattatcaacagtgtttaatgattgttgtttggtcttcttgttcttgaacattatttatgtctattaaagtcctactacaagatatataactaaaaagtaacatacaaatcaagaataaaatttttataataagtaaagtgaaaaaaaataatttttttcatgttgaagcatgcgccacgtctttctcaatggctgtggcggtgttcatgatggtgttcatgttcatcactgtgactgtgatcgtgtccaatactaccacccatatgatcactacaggcacagaatgaggtaggattctctaattcttcatcttcactttcttcgttttctacaaaaccttcatttacagcatctaaatccacttttttaactaatttaataaattcaacaacttttttagtatacccttcctttatactccaaagatctttaataccagataacaacttattattattaattatatcatcacatatttttttttgatttatttgtgaatttgtaatcattaaactataccttaaaatttcaagattttgaataaatttagtaatattatctttattattcaactttatttcattattaacaaaatccttaatactttcatcactagtccttacttctagtttctcacatatacgtttgactaaaataatagaattattatcatctttattaataaattctttaaattctttagatatagtggattcaataaaccatttcataacttgatcatccgttttattgataatgatatcatcctcattgatcaatccagcatttaatttgaatgattgtgaaagatattcgggaatgtctaattccggaatcgtcgtcttgaatgcatgaatccatttataaaaatcttcaagttccgttaacattgaaactctaaatgttcttctcttaatctcattctcttcaatgactactttaggagtattgtctatctttaattcattaactttctctattatcccgttattatcattcattattgtctataataataatatcaaagaaagaaaactcgtataaatagacaaccattgtagtaccatttataaatttcaattttgatctcattctttctttaagatcctaaattacatacttttcaaaaatttttttttcatacaaatcttagtcataaagtcgttaaataaaaaagaaagaataatagaaataataataaataaataataaggtataacttagagttttgcaggtatactctcctttgataatgcatctcttaattcatttaatgataatgttaaataatatgccatttcattaacactataaccaaatgcattatctttataatttgtaatattaatatgtaaccaatttttattaatcatataagctaatccaaaaccttcaggtacaacaggagaccatccataaccattaaagttttctgaacttaattgtgatgttgataaataccaatattgtgaatatgaaaacattgaattattgaaaaattcatcaattataagtgaaggtttagaaatatcaatcatttgctttaatccaaataaatgtctatcaactcctaaacctgaacttgcatttttaatatattgaccatgagatttaattgcatttctaaatgattttaatttttcatctattggaattgatgaattttcccaatctttaacaaattttaatgcttcatttgaaacacttctacatgtctctgttctacctttaaaatattttctagttgatgcagattcatatgttggtcttaatgtaccagtatatttataataagctaattgaattaaaatttgaataaaactatcaggtgatgttttaaataatttaatatcttccttaccaaatccaaaatattgccatgttttaatatcaagtgaattagttgtttccttaaattttacaagttcagtttgaatattatcctttaatgtattactaatttcaaaatctaattgtgtaaataatttttctttatttgattctccactattgattaaatcttcagtaaatttaaatttagaaacttgttcaactaaccaatcatttaatctaagagttggagtaccatccattttagaatgttcacctaaaaatccagaattaccattttgtgaaacgaaaatttgaattggtttatcaaaccatctattaaatccgttaccaaaccaacaatttttagatttttcttcaattgtaattggtgaattattatcaagacataaaacaaatgaacttttgaaaatatcatttaaatgagttttattctttgatgaaatttttaaaagtttaatataatttttataccaattatctctatttgaagatgttaaaataccaataggatttttatttggtccattattaattgaaattgatttaatttttaataatgattgataaatttgttgaaatgttaatggttcatctgtaatttcatcatgagttttcaatttataaatataaccatttgaaataacaatcataaatctattttctttaccattgaaaattaaattattatctgattttaaacctggaattctacaattattaaacatccatttaaaactttccatacaaaatggattatttttgattaattcaggttctaatgattcatcttcaattgatttcataaattttaatatatttaaagttaaaacagttgattttaaaatttgatcattttcaattttagaatttggtataactctatgagagaaaaaatatgaaacaaatggtgaaactggatctctataatctaaataagcataattatcccaaaattcagataaccaatttcttttatcattggaaaattcaattaatttagattgtaattctttaccttcgatactattaccaaaatcatcaataatttgtgaatatttaataaattcttcatcattttcaccatttgcatataaaggtttaattgattctttatataaatttaaagtatcatttaatggaggaactggtaatgaaggtaacgaatcttgatatttaaataattgtccttttgatgatgatgaagatgatgatgtagcagtagtacttgttgtatatggagacattatatttgcaaatgatcttgtagtattattcagttttaaataattacttgatagactgaaaacaaactttgaatttaaatttttcgatcttgaaagtgaagcagatatagtcataaaaaatgatttattgttgttttactgtttattcagttggtttaaatttgaaatttaaatttgtgtgttataagataaagtttattataatttaccatctcatccattatcttttattcagggaacgtatcttccctttatatacccttccagagatgaagatttctgccccgccaaaaactaagaatttcaccccgtcaccaactccgattccgaatctccgaggagctgaaaaattgcgggggtgtcattacctaagcatcacgtgacccctatattattatattattatcataagaattcatagataaagagacaatcactagccttaccttgccaaccacgattaccacttgcagatacgaggaatctacatgttggatcaacgtataatgaactgacaataccaccttgatgacctgcaacaattgaaaatggtacaatactacgatttttttgatttgtattattagcctttgattctaaatcatataaacgaatattatcctgtgaaccacataaaatatatctcttatttggcattgttgtaatacatgatacactacctgataatgttgggaatttaaatgtatctaataattcagtagttttccttatatcaaattgttcaactgttgaattacgtctaccaatgaaaattgtatcaccatcaactgaccatgttgatgacatacaccatggtggtgtaccatttggaacttgaatttgcataactctattatctctctctgtaattctagaatcccaaattgatacaataccatcaattgatgcacttaggaaaatatcatcacttttttgaactccttcatatttacccgtttgaattgcatctctttgaagtttttcaatatctctcttcatttcaatattatcatcaattggttttttcgattttttgtcttcatcatcatcattatcatcatttttgatatcttcctccacctcctcctcttcatcatcatcatcattaaacagtgaatcaacatcactatcattatcatttgaattaattttccaatcaattgaactaccaataattggtctatattctaatgaagaaatttgacctgttgaattaataaaataatttaaatttttaccagtatttaaatcccattttaaaatttttttatcccaagaacctgaaaggaaatttgtttgatttgtatttgttataatttttgaaactggcattgaatgatgtaaatttttatttttaacattttgatcatttgaattatggaaataccattgaattgaaccttcatttgatttaattgattgtaatgtaattgaaccattatctaaaccacttaaaatccaattaccataattttcactacataatgaataaactggactaattttaggttcaaataaaacatcagttgatgaacttatagttgatttataaattggtaattcattttcccaataagaacataaaactccattaaattgaattgaatcaactaattgatgtttttgtgaaactgttaataatgatttacctgaaacagattggaaaaaatcaaattttctaataaatccatcatcaccacctgtaaacatccattttggacctttagtaaatgtcattgaataaacttgtgatgaatatggaattgcaacaattggattaacatcattaatatctttattaattgatgcatataaaagttcatctctaagagagggtttatttgatgtttctaaatctttttgattatttaatatatcaatatttccaccttcattaggtgtatctatacccatttcctgtgtcatttgatgattgatttgttacagaatgtaaagagagttttgtatgaaaaattcaaacatgctggaaaatactgatgaaaatggaaaaaaacaaaaaatccgcgaatttggtgataattgtggtacaaatttttcaaaatgatgaattaattaattactgacactttaatgtttcttttatgaagggagaacaactacacatatatgacagaggaaaccgttatatttacagaagatttaaaatatcaatatccagaaactacacaattaggattaaataatattaatttaaatatttctaaaggtagtaaatggttattagttggaccaaatggagcaggtaaatctacattattaaaagttttagcaggtaaaaaattaattaaaagtggtaaattaagattattcaatattgatccatttgatttaagagtcaaaggattagaacagaaaactatagtttatcttggaacagaatgggcaaataatgaaataattaaaagagatattggagttgaagaattaattaatagtgttggaggtaattattatattgatagaagaaataaattaattgaattattagaaataaataaaaaatggagaatgtgtcgttgttcagatggacaacgtcgtagagttcagttatgtatgggattattaaaaccatttgatttattattattagatgaagttacaattgatttagatgttttaattagggataaattattaaaatttttatcaaatgaaacaatagagagaggtgcagttgtaatttatgcaacacatattttcgatggattaggagattggtcagataaaatattacatatagttaatggtagtgttgttaaaacatataatagagaagaaattaaatatgaaggtgaaccgggtgttgtacaaagaggtgataataacaataatgaagttaaaataggaccaattcatagtcttcatccattagcattacaatggttacaaactgatcatgatgagattatgtaagcagcagtgattacataatagattacgtaatataaatataattacgtaataaaaattagaaaattacgtaatataaaattcgcggctttagcggggtaaaaaacccattacgtaatgtagggggtgccatttttcaacaattaaagttgccctttttattgttatgactataagtgagtggcaaaacaatcaacaggctcagtatattatttattttattcattttattcatgttggctgttttacacccccgttttatactttcttttcaatctttaacttctttccactttcttttacaaatgtatctgtatctggctccttattcaccaaggagtaagtgtatataattattaactcttttctattctattttatttcatatcatctcattcatactatttaatatacacccccgcacaatcattaattaatttaaatggaaaccgttaaaaaaggtagatcaacttcttgttatttatgtcaaaaaagaaaacaaaaatgtgatcaaagatccccttgttgtacaaattgtcttaaatcaaaatctcaatgtattcaacctccaagatatggtgaaaatttaattaatccaaaagatccaaatagtgattatacctctttccttgaaaaaaaaattcgtcaattagaaaaattacttgatttaaaaattcaagatactaaagataagaaaaaagatagtggcaagtcaaataatagtaataataatgataatgataataatagtaatgtttcaactccttctgcctcagatataataaagacggaaaaaatattaaaatatcagaaaatttcatctctaataagtcaaccttcaactccaaatactaatactagtaataatagtataccatcaataaatttaaattcaaattcagatccaagtactccttcacaaattcatcaaataccaataattgatcaaccttatgacaattttatgaatcattattcaaatttatataaaacttccctactaagtaaatataacttaactgaaattattaaacttgatccacctcaaaaattagatataaaatttacaagaaatttaacttcattatattttaaaatgttacaatataaattccctttactaaaagaagatgaaattttaaaatttcatgatttttactattcaaatacaaataataatacaaataatgaggatgatgattttgacttcaatacttcaagattacattttatttatgcaatatctgctttactatacaaatcaactggtaaatataaaggtccaaatccttttaattttttttcaaaagctttacgtcatttcattttagcttcaaataaccttaaagaacttcaaaaaattgatttattaatattaatgtgtattttcctaataagagctgataaaaatacaaataatattttcttaattataactgacgcaattcacatatgtgttggtttaaaattacataaggctaaaacttatcaaaatattgataattctttaaaagatacatttatgagaaaattttggtgttgttatattctggaacgttcaattttaatttcaattactaaaaaatttattttacctgaatcaaaaattgattcaaatatacctttatttgattatgaaccttcaaaagcttttagtccaaatggtaaaacttattttattaatcaatcaattaaaatcaaacgtttagaatcaagatttaccgaacaattatcaatcttttctagtaataataataatagtaataataataataataataacaacaacaacaacaacaataataatattgttaacaacgttaacactactacaacaggtaattcaaacagtaaaaattcatcaaaaccaaaatcttctaataaaaatttaacatcaaattcgaacacgaaatcaaaatcaaatataccacaaccaattcaattaccacaatcaaataataattctcaatcaactttaaaatcgcatttaccaaaagttgaagttttctttcaagatttacagaattggagaactgaatgtcaaggttttaataataatggaattgaaaatcaaactttgttattttattattataaagcaattagacaattaattcaaccttatttagaattattagatcctgatgataaattatttaaagaatgtcaagcagctgcaggtcaaatttgtcaatcaattaaacattatcattcaaaaacttattatggtttttcaaatttaaatattcatcttgtttttattgcaggtataactttagtttattgtctttggttacaaagaaatagagatgatatgagaagaaaattattaggtgatgataaaaaacatacaagaccaacagtttctgaagatttatttagaggtttagatgatttaagagcttgttccatttccctttatgttatgagtgaacgtacaaaatttgcattaagttttagagatatttttgaagaaattatgaatgcaacagttggtaatttaattttaagatgtggtccagattcatctgaaattttatatagaggtattggtttaccacctgcaattttccgtaaacctttaaaacattttcatattgaatcaaattatattgaaaaatcagatgatgataaattagaggatgaagaaagattgaaaaggaaaggtcatttaactagaagtgcaattccaaaaggtttaagtcatttactgttacatccaccaggtttagaaaatgataataatacaaatactattactagtaataataataaagaatcgaaaattaatgatgaaaaggtaaaagagaatgaagaagaaaaagaaattaaagaaaaatttgaagatgataatattaataaagataatgttaaatcaattgaaagtgttgatatcaataatagaattttaccaccaccgattaaattaccacttttaccacaacaaaatagaatgacatcatctttaaatagtaaaaatattgataatgatttaaaatcaattacaaataatcattataatttaagtagtatttcattgaagaggaaatattctaaaactgaatctgatagtgattcaatgatttcatcattttctaaacgttcatcacctggaattcataatttatctccaataccttccaaaaatttattatcaactaataatataaataatttaccaactattaatactgaattatctccatcaaatgttagtagttggagatcaccaaattctgtttcaaatatttcatcaaatttgattcaaaataatacaaagacacccaatactaaaacaacaactacaccatcaacttcatcaaatacaccggattcaaatgtttcattaccatctaatatatcagattttagaacacaagtacctgagatgcttgattttttcccatttgttggaggtactaatgcaatgattagtaatatttctacatggactgaacaaagtggtcaacaaattccacaaactggtcttacaaaaatcaataataatgatgataatactaacaaaactattaataataatttcaataataataaaactcctactaccaataataacaataattttaattacaattacaatgattataacatcaataattttgtaccaattatgaaaacaaacaatggtattaatactctaaacactaccactactaacaatttatttcaacaggcaaacactagtaataatataagttatggtattggtatgaatatgaatatgaataatatgaatatgggtgttaccggtatgagtattaatggtttaaatatgggtaatcaattattaaattcaaataataatattaataataacaccaataataataataatactaataatactaatagtatgaatattacaaattctaataatttaaataccaatacgatgaattattctaattattatggatccttaagttctaattcaagtttaagttcaactaaaaaaaatccaccaatcaataatcaaatcaatggttcaccatcaacatttaatcaacaaaagcaaagaacgcagcaagaacaaccctctcagcgacaacaatcagtatcatcacaaaatcatagtagtatatcaacacaacaacaacaaaatcagaatccgggacttatgtctgagacatttgatagtattttcgatgttgtcggtagtgaagatttttggagtttaaacaatgatttaggatttataccctaaacaaatgaaacacttcatttttttataaacaattaaataaactactttataaaataggaattaaatattaaattccccacatttttcaacaactttccattcaacattattaatcatacaagtatcataaatatttaaatttttaccaattttcaataattgttcataatgtggtaaataatcaataaatttaccaaattctattaaattttcatctttaaaacaacgtaaaacaccaacattatcaacaatttcattagaaattaaatctttcctccaaaaaataccttgaatccaagaatttaataaaataattctacctatatcaatatttgaaactgtatctaaaacaatacaattattatcaattaatttattaccaatgaatttacattgaggacctaatgttgaatcaacagtaatccatttctcttgatatttttccaattgattagtcaatggattaatcattttaccagtttctaatctaatacctgcattacgttcattttcatcaattggatcactgaaatgtccaatatctgattcaattttaaaattttcagtattaccattatgcgataaataatgagtaattaattttgaatcaaggaattcatgattaaattcaataattgttgatgaatgttcaatttcataacctgcaaagaaccaatcgaattgatttgaaaaattttggatatttttaagtttcctaatatcaacatatttacccaatggggaagttattacgattgttgaagttgattcagattcttgtggttcagtttctaaccattgaattgaatgtcttattgataaactcattgcatgcaagataaaacatgaacggatcacttgaatttagaaattattttttgaggtatttattttttttccattaattaccggaatcattagtattttcgaaaatttagacatgtttataactatagtttataaaaaaaataataaaaggtacatttacaatatatactatacaattgtatgattatgaccaggatcattaattgtattaccatcttcatcaattgtacaatatttaatatctaagaaccattcatcatttaaaatttctttcattgtagctctatttttaatatcaattgttaacattttactaattattggtcttgatgcatgtggtaaaagtctcattaatctataaggaccatgtatttgcttttgacttttagttgcagtaactgtacgacgttcaggtaattcagattgtccatcagttggacagctattggtattcgcattattattaacagattgttgttgttgttgttgtgtaggtggaggcgtggaatcatgatgatgatgatgatggtgaacatgttgatgaacatgttcatctttcggcgttgtgatagttaatggtttatcatcattttgttcagattctgtaactggtttaggtaattcctgttgaataggttgttgttttgatggcgatacttcttgattaagaattttaggtgttgttgccatttgatttggatcacctaataatttttcatctaaaaattgatctcgtttgttatctattattggatcatttttattatcattgattgataaatcattaattttttcaactgtttcattaatttgattttccttttcctttaattctttatccctttgttctttttccttttgtaattgaataatttttttctttctttcaattaataattctttatgtttttgagcactttcaacataatcatgaggttgatcatctttcatacaataaagactaaaacttggatcatcatcctttggagctttccaaggaaatcttcttaatgtcatacaacaataaataattgcaattgaccaaatatcaacaaattgtggatcataattatcagttgaagttaaaacttctggagctaaataaggatctgaaccaacaattccatgagctaaaacaatatcatcttcaaatggatatttgaaaacaactgctgaaccaaaatcaattaatttaacaataccatcctttgtaacaacacaattatctaattttaaatctctatgagataatccaacagaatgtaaataacttacacctaaagtaatttgtttaaaacaacaattaatttcagatctagtcatttgacctgacataacaactgcaaagaaatcaattggtgcatattccataacttcaaagaaatgattattttcatttataatatctaaagtttgaataatatttggatgatgtaaagttgaaccaatacaaaattcagcagtacattttttagcatattctttaactgattcatttggtcttctagcaacaaattctttaacagcaaatgtaacaccatcactttctctaacaattaatctaactgaaccacctgcacctgaacctaaaactttacctaatttaccatattttttagtaactgaaccttctagatcatcccaaaatttttgatcagttttaacaatcatattattatttgcatcatgagtaaaagtaggagttgaaggagttgaaggagtttgatctctttcctttaaatggaaataacctgaagaattagtttgttttaaattagaaattgaatttgagattgaacttgataaaagattagaatttgattgatgattattatgtcttttattattattagaagaagaaaaactatccaaatgattattattattattagtagaagatccattatgatttaatattggactattattattactagaattcgattgagaatttttacgtgcaggtctaaagaattttttcaattgaaccattgaacttgaaccatttctatgaattggaggtggtgatgaataatttgaattattattattattattaatatcatttttagaactatatgaatctttatgatgatgatgatgatgatgagtatcatcagacattattgatatttgtgattcatttgaagatgatctacctaaacttaaaccgaaaaatgatctccgggatgaaagatgatgagtaccgggggaatttgatgaattattattattattattattaatagatggaatattaatatttgaagaagaatgtccatgtccatggaaatgatcattattgggcacaggagattcaaaactactttgactattctccctgtgttccctatgagctaaacctgcaaatcctagacgtggcatagtgaattattttatttgagtataattttatgaatataatttctaaattggataagttaagttaaaatagttaaaatagatcaaagcagcagttaactagcctacatgcaacagagacagacacagacctgaacagagaccaaccccaaaagaaggacacacctattaaaatacctataaatattcaatcatcagatcctctcactcttcgcctcttaataacccgctcccgcgtacttttttattacttttactttttactatgacaccgcttttgttgtgtttgattacatgttttttatacagcttacacttctatctagattacttacaatggaacactcttatctgctggatctctaccgtaccagatataccatccttcatacttatgacgcaatggtacatccctagcatctaattcactaatatcaactcctccctgttgtggttgttgaattatcctcttcactttaattgctgatttaacatcataatattgaagtccaaaacataatttacgtgaaactactggtaatacttcaacaagtttcccatatttaccaaaatcttccttgatttcatcaatttcaaattcttcactataattaatacccgcatcaggatatccattcctttttcttgtgctattagtgttgttattattcatgttgttgttgttgttattatttatattgttgttaactgttttattattagtgttattaaatttactggttcgtctcttatcatttaatggcttcttgaatactaataccctacgtgctttctcttctcccttcataagtttagaaatatatttatcactatattcacttacattggcactttcattatcttcatattcatatcttcattacattcatcattattatcaacattacttacatcattaccactttcatccatttcaggaatccaaacagtctttaaatgaatatcattaactttgaaaagtcccgtcttggaataaatataaaatttctctgcatcttcaaattcattaaaatgtaaaaaaattgaaacttcatcccaattaatactttgattcagttcatataatttatcatcctcataatattgataattatccttacgtacaagttcaatccttcttaatggtcctccatataattgactaagtaatgttgatatactcatctttttcggtatattagtaatagcaattatcttaaaatgtggtttattaatattaacttcttcaatagttcttaaatctgctattgttaccattattactaacattcattataccttcattcttttgtaatgctttattaacggtattagtattattataagaattacgtttcttttccccttcattaccaccaccacctacacaaacattataattatgactataattataactataatttaatggatcatatccatatgtttgcttagtttcatattcttgttcagaattaaataataatgttttagcaagtttacgtagactatatctatcctcttttacaaaatttgatgcattacctaaatgttttgtgttcattattattattattattattatcaataacattgtcattaaaaccattattaatagacttttgccatctttcattattagattgtcttgatccaaccctttcttcagtaatatcttgcattttttactataggttttaattacttttatttatgaaggtattttattctttgaattaatgagcaatgtctttagtatattgtattttatgtgatagggaagtagtgaagtagtgttatatataaatatcaccaatatactaattgtaatacccttacaagagtttaaaagaaaagttctataataaaaaagtaatcattataaataggtatagagtaaataataataataataataataatagcagattatccccttttatttttcaatcttatttcattcctgttttaagttaacaacacctccaaatcttgatgtatcaccttcaagtaactctcttaatgccatagtggcatatgtagatacccctaattgcatctttaaaataacctgcagtctttgatccaccttcaattccatctaatatttgctttacttcttcatcacttttaccttgacttttattaaattcctttaattttaatatttctaaatcagttttaactaattgatctgtaacttgattatatttacggaaataatattctaaatgattaattttagcaattaaatttctatatgatccacttaatgaaaattctctaactttacgtgtcatattaaatggatctaaattatctttcttcataatttcaacataaacttctcttaatttttcattagttggataaataacatcaaatccctggtgtcggtaaaacaacatcataaatattaaatttcttagattcaatctcttccttagtaattggtcttgctcttaatcccggtaattctttaatatcttgaataatttcatcatcatcttcattatcaattatctttttatttaattcttcattatattcattagaattcttttcattattacataaaactaaatcaccttcaacaacttctaatccaaataattgaattctctttgatgcaactaaattccaaatatatgattgatatgaatgtccatacataattcttaaatttctaggtatacccataattgcattaaaatatgcattatcactaaattcaccagttttagaatctttctctgatttttcaagtctacttaaaattgaatattctgcattacatttccttggcatctttttaattgctaattttgcatccttagtttctttccaaattttcctagattcaattgatccaggtataacaattttttgttcacttaaaattaattcacctgcatttttccaattaccttgtaaaatttctttaccaatttcatgtgttgaaatagagaatgtaccaaatctttgcataccataataattaataaatccaacatcctttaatgaatttaaaattggtgtaattgcttcttcaatacttaattttggatcaacactttcaacatctttaattgtaataataaattcattaccctttaaatcacctaattttattgcattatcatcatatttaaaacaacctaatttacaaccttttaatgctttatttaattgtgtaactctttcaactgaaaacctttcaattgacattctttgaactgtaacacctcttctatcctttgtacctgcatatttaatattcttaatttgagttttcaaaaatttagataaaatacttgcaacttccattgtttccttattctccttataaagtgaaaaatgtaagaaatttttaatttcacctaaattatgttcaatattgtttgtaactttagtattctttctcttacgacctttatttgcattaaatccaaatataaatgtattattagtagtagtgacagattcaactttaccattgaaaacttctctaattaattgatgaatctttgttctaattgctttatcttcaaattttttactaatttcaacagttttcttattatcttttaataagctaacaatttcagtgacttcatcatcactgaaaaattctttcaatttttccttttcctcttcttcaatatctaatgtaatttctctttcctttaatttacgttcttgttcagctaaaattgctttttcctcatcagttaattcttttggcttaaatccaacatcagttaaatgaacaacatttccatcaacatcaatttcattaactaagaaatcagtgtatctttgttttaatgtacctctaattctaacatcggaattggcatgacatatgaattcagttataccaacatcaacttcagttacaccacctaatgaatcattatctgatgtagattgtggttgtgattgttcgattttagcctttttggtagattcttcaactggttcttcaacaagtgatctctttaatgtttcaacctctcctgtactctccatattgactatattccttatcaacaaaagacataaaacctcttttcaagataataaaatataaatttaaaataaaataaaaaaattttgaaagtgaaaaatttatcatgaaaatggaaatggaaaaataaacgcgttcactttgaagtttctctacctgcagttgccagttctttaactctgattccatcttaagggtggtatagatacctgtttgagttaggttattagttgctaaagttgggcaacgggaaatgattgtcagtggggaatatttgaaaaagaaaaatagcataccattggaagatataaagaataagataattaataatacaaatacaaaaattaataaattcatcatggatgataatttagagaagatggttgaaccaattacacaacctacccaacctagtaattataatcctgcaaaggatacactgagtaatgaattagttgaacagggtgtactttgtagattaatcggacgtacatatgagaaatcatttcatattgatgttaaatattcacagggtaagaaaattatagatgataataataatactactaaacaagaatggttatttggtagaaataatcatacatgtacatatttattacctgtacaaagtacacgaataagtaataaacattttaaattatggatgaatataagtaaaaataatgaagagaatgataataatttaatgattcaagatttatcaactaatggtacatggttaaataattctaaattaatatctaaacaaaattatatattgacacaaggagatgaaattgcaattggtattggaattgagaaagatgttgttagatttgttgttcatttccctaatccaataattaatcaaatgttacaaaggaatgaattaaaatatgagacgggtattaataaagattttataattcgtgatgaaattgttggttcaggtgcatttgcaacagttaagaaagcaattgaaagatcatcaggtataacatttgcagcaaaaattatttcaaagaagaaagcattaggtggattagatggtgttgcaagggaattacaaattttgaaaaaattaaatcatccaggaattgttaaattaaaggcattttatgaagatgatgataattattatttagttatggaatttatatcaggtggtgatttaatggattttgttgcattaaatggtgcaattgatgaaagtgcaagtaaagaaattgctaaacaaattttaaaagcaattttttatgttcattcaaaaggtatttcacatagagatttaaaacctgataatataatgattgcacaggatgatccagttattgttaaaataactgattttggattagctaaaagtcaagaaaatgagagtagaatgaaaactttttgtggtacattagcatatttagcacctgaagttataacaaataagaaaaaaatttctaataataataggaaaagatatttaggtaatggtaaaataactgaagatttatattctaataaagttgatatttggtcaattggatgtcttttatttgttataatgacagctcatttaccatttagtggatcaacacaagatgtattatttaaacatataattaatggtgattatcatgaaaaattattagaatcaatgaatatttcaattgaaggtagagattttataagtagattattagaagttgatgttacattaagatttgatgcattacaagcattaaatcatccttggtttaatgatttagatgatgaatcatcatcacaagttagtttatcacaacatttatcacaatctcaaagaccgaaaatgaaatctatatcacaaaaaaataataattttattaataataattttaataaaccaggttttaaaatacctgaaatacccaaggaaaaaattgataataatatttcaacaagtcaaattgatagtcctgatagaaatttttctaatattaatgcatcatcaacaccaattaaaccaatatcatcaacaaatttaacattagataaattatccttagatttaccatttaatccaatacctaaaggtacattaatgtccttaactttaacatcaactaaaacaactaaggaaatgattgataaaatttacataccacagggatcatcttcatttattattggtagattacccaatgttaatattgtcattaatgatgatagaatatctaaaattcattgtattatccttaagagaagacacgtatctgatgatattaatgtatcaacaattgagaattctacattaagtattaatgaatcaaataatgatggtgatagggataagattgttttggatgatttatggttattagatttcagtactaatacatgttatattaataataagaaaataggtaagagtaaaaaagttaagatttccaataatgatatagtttcatttttcgtggataagaagaataatattagattggattataaagtgaaaattattgataatactggattatttattgatgataatagtagtaattgccaatgtattggaattgatgagaatgataagaaattatttgatggtaaattaaaggaaggattgaaactggctgaagctaaaatggctaagaaacgtaaaaatgatacacctattgaagtatcaaataaaagagtgaaatagatataatagatagaaacactttgtaaattaataaatatgtacaattaaaagctagagataatgtttatcatttattgtattaaagttatataactatagataataaaaataatgatagaaataatgatagaaataaatgtaagaaaaccccaaccccagaaccagttcttttttttgaattttttaaattattttatgttattttactttttttttttaattaattaatatcaatggggaaatgtaaaagaaaaaaaaatgtagtatatgataatcgtacaatcaaactcaacgaatgaaaattaataaatgcataaaagatttattatagattaaatagcaggagctaaaccaacagcatctttacctaaatcataaattgaataatattttcttaagaaagcatcaccaataattgctaaaggaccaattggatcagggaaatccattggagtgaaagcagaaatacaactacctgaaacttctaaagtataatcataaggagtaattgtaaaattataaccatcaaaagtgaatgttaaatcaggtaaattatctcttgaattacaatcaacagtatattgaccattccaagatttttctgcaccaatttgagcatttaaaatttcagctaattgagaaggtaaagcaattaatgaagtaccagtatcaattgctgcaccatgaccttctaattcagcatattcatcacctaaaccaataccatcaaatttaacttcccaataagcttttcttctaattggtaaccaagtaatatcaccattaaatttagatttatcataaccacctaatgaacaaacaccaccatcttcacctgctttagcggaatcacctaaataaaatgcaaattgtggtgcatctaataaacctttactaattgcattataaattggtggaacaactttatcaactgaaattgtatcataagctaaacctaagataccatcgaatttaccgaaagcgaatgctaaacctggttcacttgttgcttcagcaaaatcttgttcaggtataactaaatcaccaaaagttaataaatcttgagagatgaaaccttccaatgaacctgaaccatatctaattgcaaaatcggtaccattttgtttataagttgaagaagaatcatgatcatatttagcatgtaaataacaagctaaagaagtacattcagtacttggaacccataaattagatgaaccagtatcaaggataactttaaaagtttgaccaggagtacctaattgaatttcagtaaaatattgagcattcatataattagttaaaggtaaatcatgagatgatgatgaagataaggattcaataattgaattttcaacaaatggaacaaatggtgcattataatttttaacaaaattagagatatatttacccttaattgaatcaacataatctaaataggagatatctttaaaatttgattcaaatgaatgttttttaattttagcattatgaacttttgcctcagcagagccactgaaagaggctaataaaagaaccattgaggtaagaattgagtttgagaagtacatttttttaaatttgttacctatacagtgttaattgatgatagttatctgtactaggagagtgtgcaaagggaaagttataaagaaagttaagaagaaaagcaggatataaaaagatggcaatatatagataagagctaattaattaactaaaattaaaattaaaaaaaggatgagccagccttcttttcttgagggcaaattatttttattttattatggctttattattattattaatatttcctatcggtgattatgtcatcgtgtcacgtgacagtcacgtgatcatatattatatttaatattacgtaatcatttatttattatctatacttgccatgtaatcatctataaggaaatccattggtgataatggtgtaaattcacttaatttacgtatatgtttaggtgataatgtagatttaacactggaactcatctcaattggatctgtacttttcgtatagtatggctttatattgatattactatttcttctattattattattattattattattattattattattattattattattattgactatattcattggatcatttttattactattattatcattataaactaaatctttaacatcaatctttggtgaaattaactttattttaccacttttactaatcctatattgcttttcatttatttgataatcataattaaaatattgtattattaacattgaatcaaatataactgtacccattgcaccaataaaataactaatttcattattccaaaaatttaaactattttcaccacctttaatggaattttcacaaattaataatgaaattgaataaaataaattaccaaataatgcaaatattataagttttaatgaaattccacttgtacttttaatcttataattggtgtatatttgtggtattcttgaaactaaataaagaaatgtacatatccatgcaagtaatttaccaaattgttccttattcatagaaatgaaaaatattattatcatataaagtattgaattattatttttatcccctttatcatcattatcccctataataggcaccccctgaactttggaaatacttgatattaatgcaactgatacaatcttcttcaatccattggatgatgatgatatcgacattttcctctccctattactcccatttccactactattactatttctaaatatcccctttactcgtatctttggtgatgttttatattttggtaaatttaataattcatttctaattgtaccatcaatagatccaaaagtctctaaattatcccttaaactacttcttggactattaatatacttatccttaccatgtctatgtttattcttttgtttaggatgataccatctactttcaggattattatacattttggtataataataatattgaaatcctaaaataatatcaataatacaataataactactaagtaaaatttgaaacatcattgcattatttaataaacaactaattaaattaagtaaatcaccaccaaaccaacaaattaaaaataatagtgaaaatccttcaattgatttatctgtaaaatttttaataacttgtggtaattgtgcaaaaagccaaaatgatatcgacatatatccacttaaattggataatgaatctagtgttttgatagtatttgatgaaagttgaagattttgaaaaaaatttgatatccattctgctaatgtatttgatattgatatcgatgatatcaataatattattcccataccaccatcatctcccaataccatactctcctaatacaataccttatcataagaaacaacaaacaaaaccttcaaaaaaaactatataaaatcaacatgttataaaatcattgataaaaaaagcttctatcgcagattccttctcttccctttcgtttcgtttctttttattaatgttaccgaaaatttatacaaaattatatatattcacatactatatactatacaatattaatatcaggataaacttccttagcgtatttgacaaacttattaacattcaaatctaaaaatattggcccccaacatacaagtaatccctttgctctattaagtgaaattgtacgaaatacacgtacataattttcatttggataataatttcgtgtcaatttttgaatataatatatatcagaattcttaggtaagaaaagacatatattctccgtatatttacgaagttgaagtattaaaatttctaatgaaaatggtaatagattattaagatcatatgtttcaacattaatatattcaggtccaccccatggtggtgatccaaatatacaatcaatcttaacatcttccatttgctctaaactatttttagattcctccttattcgcatataaccttctaatattatgtatttcagtatcaatattatatccatcaccaagatcatcatcaacattatccatatgatcatccccaacaactttacattcatcattttctgtaatataatacatccaattcaatgggagtaattttaaattatccctcctagtttcaccaaaatatacttgtgcattatgttttgtacaaaataaatgaatatgattaatatcaactgcaaaaacttcatcaaaatattttaaaaattgtataacattacctccaccacctgcaaatgcatcaactacacgtgttggtctatcatctatttctccaatacaatatttaattaataatgcagtaaatttacttattgattcaggtgtaacactaaaccataattcctttgttaatattataccttcatcatattttttgaaaagtctatgtctttgtttccaatatttaagcataactccatcaaattgttcttgtttcataaatatcttgttcatattctcattggaatatttattattataaatgacaaattctttctttactttatctttctccttatctttatcaatacttatatttgtttcattatcattatttatttgtactggctcattagacattagtgctatatccgtacttccatcttgaacatctaaacccataccaatcaattgtaccaaaacaaataagtaaataaacaacaatctgagccaattgtgttacaatttcgaatctcattttggtaacatgtttttttttcaccactggctcaaaaaggaaacttattatagctttttcttctttcttttttttctttctttcttctatttttctatcaataatgtcaggatacactagaggacatatctgtggtgttgataattgtccctctagactttggaaaagagttgatggtagaaatgtttgtcaatacggtcatattaatgaacatgatattgaaataaatgatgatgatgaaatgatggcaggtggaggaggtaatggtggatcatcaatgccaggtgttggagattttagtagaagattaggtaatgttgcaggattaactacaagtcaagcagtattaaataaagttcaacaattatcatcagagaaaaattcaagtagaaaatatggtgaagattttaaaaaattacaagcaagatgttatcaaattatacttgctaaaaatactaaatttattataaataaattaaatttaagtcccattcaagaagaatgttatattaaaattgtaatgactatatggtgtaaaatattagatgcatcaatcaatcgacgattagatacaaaacataaatatgttgatattagttatttacaaataatcaattatctagcaataattcaaatgaatataccaatgtatttatctgattatattagtttaacttataataatggctttaatttagaaagaactgaatattgtttacctaaaagacttagaattcaaataccaatatctcaattaagttcatttcatggtcatttaaatttaaattattttaataaattaaattcaagatttattactgcatatatgaaaaaattcattaaggaaactgaaattaattattatccatttcttttaagaactatattaaatttatttttacctattgaaatttgcaaaatgtacaagaattgtgttgattttttcaaaattaaatttacatttaatgaaatgatgataacacatatccatcctgaattgaaaatgcttgcattattgataataattactaaaatatatttttcacagaaggaaaatagtaacaatttgacaaattggtatcataaatatcttaaatataaaaacagtaatgaacttttcacattaaatagtagttttattaatatgaaaaaagtaatatattatgaatcaaccttcgaacatatttacaattgggatcaatcatttgttgatgagtttatacaattttatgaaactagtatattacctaacatcagtgttttcaatattgcttcaagtaatgaatattcagataggaataaattaaaaattgccaaatctattaaagatttatttaaatcttcaattgatccacaaagagatgatgttgaagttattgaacaaaatcaaagtgaatacatggaatttctcattaaagtatataatgatactgatgttactaataaaactacagaaattgaagaaattgatattactaaaattgattcagttttaggtgaacatatattatgtcttttacaatgtaatcaaatgcaattatctggatcaattaaacaattaaccaaacaattaagtcatattcaacaatagagatacttttctaaaggacaataaaaacacaatttatatacaaaatttatagaccattataaatacttcattggatccttaggagctggatcatttttcaatgataataatactttatcccttaatctaaacattggttgtaaaacccaagtattataatgaagtacatttgtttgttcctttggatctctaataatattaaataaatatggtgattctaatttacccttaccttcattaacttcaggttcccaccaaagatgtaatttccaatctctccatttaattgcacgtaaatcatccttaataaaaaataaaaatccttccctttcagattttttattaattggatcttttaaaaattttaattgacttataccatcaattggtctatcatttggaattttaccattaattacatcaataaatgttgaaaaaatatcagttacatgaatcatttcatttgtacgtatattttcaggtataatttttggccatcttgcaataaatggaactcttaaactaccttccattgcagtatgataagtaccattataaaaacctgctgaacctctataaggttctctgaattcaggtccattatcacttgcgaatattaaaaatgtattatctttaatacctaattcatcaatatgtttcaataattgaccaacacgatgatccatttcaaccattgaatctgcaaaattcccatttttagtaataccttcaaaatctctatgtggtaaagttgggaaatgtaaatgaattagggggtgatataagaaaaaagattgtttctcgtttgtcattctattcataaaatcaatacttttattaacaacattttcatcaattaatcttctttgatctaaatcataaatacaaacatttttagattcttcaccctttttaccttccattatataaggtaattcagcaatacttggatcaaatccaacactttcagtaaattgtgattcatcagttgttcttggaattccataccattcatcaaatcctctatcagttggatatctaccaggtacatcacctaaatgccatttaccaaaatgagcagatttataaccattctctgctaaaatttcaggtaataatttttcccaaggttgtaaaccttgtgggaaacctggtggaactgtttgtttacaaccagttctaaatggatgacgaccactcattagtgctgatctagttggaacacaatcactttcaacattaaaatttgtacataaaacaccttcagttgctaaattatcaatatttggagttggtgcacctcttaaaacaccaccaccataacaacctaattctccgaaacctaaattatctgcaagaattaaaataatatttggctttgctggatctaatgacattattgattagtttagtgatcagaaaaaagaacaacatgatgttctctgataatcattgacattccaaaccataatcattatatataccatatataaatcatactttcaaattacttatcagtgattcaattgattgaaaactggaaaatttaatctaagggccgagaaaattttatcaaccgagatgccatagttttataattttgtttgaaaagatggttatttcttaatatggtaatttttcagtattacatttcaaaaaatttgaaatattctaaatccaatggttgataatcaaacaaattgtttagttgattttcatttgataaatttaaatctttcctaaattcacaatcaatttgtaatttaacccttttattaccttcggaagtatcaagaaattcacgtaatttaacaattaattcaaaaacttcctgtgatgaaattggccaatataatttaaaatttttaagtaatcttataacttcatcaacccaaataattctcaaatcaacattttgttgatctttctgtaaatcaaactcacaaaatttataaatttcatttggtaataaactaaaatcataccttttattcctttgattataaatatcacgtagtaaaataaataagaattggaaaggatttgcatttctcatattccatttaaatttactagttgatttgaaaattgttaatctgattctagtttcatataataaaattaatacaacttcaattagatcagaatcgtatagtttatccattgacagtaatgttatgaatgattgactatctttataatttttatttgtatgacctatattgatattaattttatttggtggagtttgtgatgatcttctacttatattattaagacagtatttgtataaaatgaaaattcttaaattcactattctcgtattggcaattaaccatctattagttgatgaatcataaatggtattattctcagacaatttcattatattattgccccattgataagttttttcatacattgctaacatctctaatttaaacaattgaaaatcaaaattttggaaataattagtatctgaatcaacactcatataagtaaacaatttacttaattgagaattaagatcatacatcatattattataagagatgaaaacatttaaattatttgaattttcaaaatttgaatcaataaattcatttggtttgggtatattaacaatttttgaaaaatgatcagctgtattgaaagtattcatccaaattgatgataaaatatccattctattagttaaattccaaattaatcgtttatgctgaacatttatgaaaaatggattattattatcaatatcatcctttaaattaataccaattgataataaaattctaattaatgttgcaactttaacatttatatttctataattaaaagatgcaacttcaaatataattaatgatgattgaattgcttcaattgatggaatttgtgggaaatttatataatttaataatttttcatagaattcataatattgtctctgttcatcaatacataattgaatatggttttcatcatttgatttaaaagattcttgaataagtgaacaaataaaaattgatagtaaaataagtaaaaaaggtacatccaatgaattgataattgattcatcaattttatcattagcgtttatatcaagtaaaatcaatagtttttcctctatggttgatttatgtaatacagggataaatgaatgaatagaatcccaatagatattaaaataatacataatttttttatttttagggaatttagataatatttcaattaatattgttaaatcattatcattatttaaacctaataaaatatcatttatatttggattaaatgaattatgaattgaattatcaacaaataaatttttaattgaagtaccaagatatgaaaataatgcatttgaagtatataagactaaatttttattattttgttgttttaaagtatcaatattagtagtagtttgattattattatcacttctgttattaacagatttttggaaattataaatgcaaatagatttatttaatttggaacaattagaacatgggaatccatgatcacattttaccttatgttcatagcaatatttacagctactaatcaatctattcctttttatcttaggcatagtttaggcatatataattacaaaagaaaagaatatttaaactatgttatctaatcagagtcttgaaaagaactcttgacccatcaacactgatgtatagcatagtagaaattcacgtgacagagcactgtggctgataagagaagtaccttatcacaatatcacaatatcatggtttatcgaccgacatatagctatcacccgaatacttgacatttaacggttgtttagtggatttttcacttatcttttacctgcaaacacacaacttttcaatataatatacatttgattctttaaatcattcaaggacttaccctggagataaatgtatactgtggagtttaagtttttctgaatgatacataaataaacgtcaaccccccaattattttggaaccaaatatcaacttgatgttaatataataaaaaactttttcttcaaatcaatttattatatattattattaccatcatgactaaggaaattaacttagaggtaaattgtacacatacaaatgcaacttcatcaacaagtatctcatcaaatcaatctcaaaaaatccaatattggtcagataaagaggaacgaaaacttgtatggaaattagatttaacaattgttttatttttaatgttttcattctttacattacaattagatagaagtaatatttcaaatgcaataactgataatcttaccaaagatattggtattacaacagatcaagctagaaatggtaatcaaattcaaattgctgcaattgttgttatggaaataccttcaaatattataattcaaaaatttggttcttttaattggttaattttacaaacaattttatgggggttagttgcaattttccaatgttttattcaaaataagaatagttattttgcaacaagatggttattaggtatgtttgaagcaggttttattcctggttcaatttattatatttcaagattttataaacgtaaagaaatgtccaaaagaacaattttattttattttggtaattattttggtgccgctgttggtagtttgatagctgctggtattttaaaaattaataataaaaatggttggtcctcttggagatatttatttcttattgaaggttgcataactatttttggtacaattttattagcaacttttgttccaaaatcaattgaaaatccagttccgttacatggtaaatggaaatatttctcagatagagaagttagtattataagtgatagattagcattggctgatgataataatgttgaaaaagatactgttccaattactttttcaaatattattcaatcaatttttcattggagaaattggttacattgtattttaaattttattacaattgttccatatggtggattacaatttttcacaccgaaaattgttaaatcattaggtttccataagacaaaggcaaatgctttagcttcaattggtagttttggattatgtgttttatcatcatttttctcaatcttatctgatcattttggtaaaaaaggtatttttatttttattgcttgttgttattcaattatattttcaggtgtacttaaatcaatggaaattggtcatactaaaaaatggacaatgtttgcaattattacattagttaattcaggtgctggtacaactcaagcattaaataattcttggatttcagttaatagtaaaaattatatggatagatgtgttggtttagcaatggcagttatgggtgcaaatttaggtggtattacaggtcaatcattatttaaagataaagatgcaccaacttataaacctgcctttttagcaattctttgtatgtatgcaggttctattgtttgggttttgttggttatgggtatttattattatttaaataagagaggtactacaaatttgcctgatgattctaaattagaaaaacaagaggttaatgaatcttcactaaaatggaaatatcaattatgaccatataaatctaggttgctttttttctttattttcttacattataatagtaatgctattttacacatcgataacactttctataattattcgattatgataaacatctcttatctatacaattacctaattaggcaactcctgccgttcatgttagattttggaggatttttgctgggcattctatcgagtagattaattaattaagtaatatattcatatgtgaataaacaaccaggaaactggttaaacaagttaccaagacaaacatataaatatagattaaatccgcagcttccaacacggtactcaaagcctaatttacaaatactttctttcttcaaaaaaccaaccaaaatgattcatgaaaggtatgtacactctcaaataactaccaaataaaaaagaaaatactaacatataacagaggtactaaaacccaccctttaaaagcagaagaaagagctaaaattccagctattgggttaggtactttccaatcaactggtgaagagttttacaattccgttgaggcagcattagagaatggttacactcttattgatacttctagtatttatggtaataaagaggcttttggtagagcaattaagaattttcttaaggaaccaggtacttcaagagataaattatttattacaaacttaattatggtgtgctgattgtaaagaacctgaaaaagctttaagaaaatcattaaataaattagatttagaaatgttgatttatatttaactcattggccaattggtattcctaatggtggtagtttattaccaatgaatgataaaggtaaaagaattgctataccatatgatgaatggaattatattgatacttataaatgtatggaaaaattatttgaattaggattaactaaatcaattggactctctaattttaatgtaccaaaaataaagaatattttaaataataaagaaattaaaattaaaccagtttgtaatcaagttgaaatgcatccaagtttaccacaagttgaattagttgaattttgtaaaaaaaataatattataattgaatgtcattcaccattaggttcaactagttctctaattttgaaaaataaaattttacaaaatatttccaaaaagaataatatttcacttgcttgtctagcaatttcttgggctgttgcaagagatactgtcgttttaccaaaatctctcaatccacagagaattattgataatattaaaaccgttgaattagatgaaaatactgttaaaaaaatagaatcaattggtattaaaattcctcacagacttgctaatccaccttgggatgttaaaatcaatgttttcgcagattcagaagtttattaaagttaattggaaaagttcttatatttatatttttgataaaaaattatctaattgatcattctttacaattatattatcaattaaattttgataaaattccataccattatttaaattatttaaacattcattaaatccttcaaatgtagattttaaaactttaatagattctaatcgtttatttgatattttaacattttctttatttctattgaaatctttgaataggttttcaaattgttgatatttttcaatcttatcttcattgaattgagtaactgtatccacatctttggtaaatttgaaaattaaattcttcaatagttcatctaaatctatgtccctattatttctataattttcaaaaatatcacatttcttagccttatcgtttactttaataattgtattatcaacgtttttcttaaattgtttcaatgattctataatgtttattaaatgttcatatttctccttaaatttaggattaatctccaaaacattagatgaaggtaagtactcctttaatgaatcttcagaattataaatttccaaaaatggttttaattcattaacttgagtatttattaattcatcaccatcttcactctgttttatataattttcataaattttaaatgaattaatcaacattgaaccaactggatctttttcaatttttttcatatcatgttcatttattttagtccaggtattatctaaacttaaacgacattttgattttaaattagttaaattttgatataattcattaattatttcaattccaccattttgtaaaatatgtgatttttgttcaacaataatgggtggtatttgatcatcattaattgaatcttgaatgattttttcattctttagcaatttatcaatttcaattgatatttcttccaatggtaatattaattgttcatttatgaaattttcaaattgtttagaacaatcaattaattgtgttactatagtatatggaatcaatgaatcaaatatagtttcatcatttaaatgattaggtattagagatttaaccaatataacacgtggtagttcaggaagtgtattaaatggtttaactaatgcatttgaatccatttccatttcaacattcaatttcaatttcaaactttcaaaatcttgtataattttagtaaattttgaataattttcataattagattgacttattatatcccttgattctaaaatatacatttgaccaattgatttattatttttattaaaattaatattagcaaataaaatatatgagaataatttaaaataagtaaacttgaggtaattataatcattatcaatacaatcattataataatctgaaatttgcattgatattttaattaatattgaatttttaaaattatcaaattgtgcctgtaataagtaaatttcctgtgattgagccaacattaatttcattaaatacgtgtatgtatcatttaacatggacaaacaaccaatacaatattgtgaataaataccggattttttataatcttcattacgtagttcaataattgtaagtattgaataatatgaacctaattgataaattgatgaattaatttcaaattgtaatgaattatcaattttgtcatcccattggaaattaataacatcaattggtagtttatcattatttaatgagtttattaatgatatatattttttcaatttgatgataattgataaattaattgtccaaatgtcattcatatctataaacaattcatttcttaaatcatttaataattgaattgtctgtaaataaggtttaatatcttgatttaattcaatttcaaaaactcttttgaaaacattaactaaatctacctttactgtcctcaatggacgtaaatacatcataccagattcatcatcatagatctccatacctacaggaaaagaacatagagttatttaatttgtaaacatcacgaaattttcaacttgtaattattaacttttcgtgtacccaacaccaacttcactcttttattaatgaacaatgataacgggtttagatttgctacgtaatcaaccaatacattgcactactggtatagataaacttgatggtgatggatttgatgaaggtatttatgatattagtggtagtataggatatggtagtattggagtttatgagattataattgaattaatgataagcaagttaggaaatggtggtaaggtattatttattgaaagttataataagttcccatggtttaaattagagatgaataaaaggtacgataagagatttgcaaatatggttgattgtattagtattgataatttaatggaattaattatattaatgaagaataatgataggttattagataattataatatgattataattgattcatttaatttaatgtatgaaggatttattgaagaattaaagggagaaaagagtaaatatgagcaatgtgttcatttattattttatcaaatg

SEQ ID NO: 10 - DNA, 83377 bp, Pichia kluyveri
  >Nicaragua_Y298_000011F_chromosome
tgattcttcttcattatcagtttctttaatttcaagattctccattttgggcacaacttcattatcacctgcactcttggtatttgaatcatcaaatttatcctcaacaaccgtttctgatgtttcgtctactttaccagtttctgtagattcgcctttagactcttcttctacctttttcaattcggattgctctttctccgtataaacctttgcatcctctaatatatcagttagatttctaccaagctggttaagtttatcacctgggtatgtgaaaatattcacagcaacaccggaggaaggtgcagtatcattagttttaccttctaagtccattaaacattcaccaacagcaataggtatatttggtttaaggtaattcacaacagcaacaatagcaccatttttcaaaccagcaccaaaaggtccaatacaaccacgtatcattaaatttgcaccattcattaatctatcaataactgcatcatgtgtcatgatagttggaatacacacaaaattatcatcagacgtgttgattgataaatacagtccttgtagagttggaatgaaatcattaccatctctgagttgacagaaaattgggtccttagttgttgcatcgtaataaatcatacctttcttgatttctggagtgttaaatactgcctttgacatcttttcaggaactctgaaacctttcatctgtgtttcaatgtcattttttaacttccttctttcagaagatttcaaatttgcacttggcttaatttctatagtttttctgaacattactgtgtatatttttatgcaatatttgagtatattatcaaataacgaaaaaatcagaaagaaagaaataaagacaggaaaatgcatgataaatttcatgatggaaattttggcgtaatttccagatcttgatattccatgtttattttatgtatagttctttcaaaagtatccatagaagtaccattaataacatagaaaaaaccgtaattgaaagaagaatgagcttgggtacggcaaaacttccacatcaattatcaaactcatcatgttttacaatttgtcctcagatggatttattatcatttcaattgaatgatacagttatttggatttatcgtcaaggaaacgaaaaagtatgggatatagatattaattcactgaaaacagatgatgaagaaattaacggaactcaacaaaagctgatcaatcttgtttggaaacctgatggtaaacgaattgccatcgcatcaaataatgggaatctatatttattcaatgcaatgcaaggtaatctaataagaaaattgaaattgaatacagaaatatcatgtttgacatggaatgaatgtaaaataagccatactaaagctaaatcgaaaggtgttgatggaataatagatacaattgatattataggctcaatgccagcattgagatctagcataggaaatgtgaaaggcatgtcaaataaaaagaatcctgatagtaatactcataccaatataaacacaggattgaaatttattgatgatgaagatgatgattatccacatgatgaagaggataataaagatgataaaagtttaaatgttatacttgcaggttcaaacgatggaagtttaacttacatttttggtaacatttttgtcatcgatgatatctgtatcaataacaactttaacaactcaaaaatcattgaaattatacccaacaaatcattgacataccaatatgtgttagctgaaagtgaagccggttttagtgtttccaagttaagtacacaatttatttataatgataaaataatgaacaaggtattaatgatttcttcaaaactattgaatgtgatgttgtacttaaaaagagcaacgaagaagttagataataagtacaaattgtacatggattatactattagaattattgaactattaagaggtgaaattgctgaagatgaagagaataatatttctgatgaaaataatattaaatttgaaagtaataataccgatccaatttatgacttatatgatttacttttaacagggtcgttgtctaatgcaactaagaaatggttaactgattatttaagtgatagaggtattaaaagatggtcacaattaggaagtacttatttcaataatgcaagaattacaatctataatcatattatttcatcactacaccatttcttcatatatttaactgatttgaaaggtttaacacagtatgatataaatagaaattttgaatatacagatcaaatagatgaatgtattaaaatatgtcaaacttttatgaaatacgcatatcaatttatgatcgagttgaaagaaaatgaacaacattttgaacaaacaattatatggttatcaaatatattatctgagataacaacagatgagaaagtcaatataacgtttaagactaatgatattactaaatttttgattttcattagtagtaagttaaactcgattgagagtaaaaatgatgatacacaaattgacattcacgatggcgataatgattattctaaaattaacaaatttaccaatgttttgaatattaaattggataacctcttcgaaaaaatcaaaagagatgtaaaggaagagataattatggagaaaagtattattttaacaaagcaaccagatgttaacaaagaatataagtttaaaatatttgatactcatgggtttttatatacaactaagaattcacatattattatgcatagatttgatttgggaactttgcatgtaacctattttgagttcaagatcaacactgtctttgaaattatagatattgaaatggttagtgccgatatgttttccatattgtacgaaaatgttgccatcttttaccaaacatcatacggcgataaatctctaacaatagcatgtacctataatttggaaaaaatcacaaatagtgaagaaatgatgaattttaaatcagggtatttagcagttaataaaacaggaaaatcattctgtgtattagattctgaaagaaagaggtatctatggctgcaaacctttttataaccatatattcataaatgatatttaaatctttgctaaatcatataaattttttatttcttccgacatttgctttctatgtaagtcaatgtctgatttattcaactcgcaatcattatcaatatagaaaatattgtccacgaatgtacaatatgcctctctcattaatccatccattcccgctaaatccatagcattgaaaactttcatagtttctttagacactggacgagttttcaaataaaattgctgtagttttataagtctattcaatctcttgttaaaaacacgacatggtgcaattggtcctccaaatctatcagcatctagttcaagtttcagtaatggtggtcccaatttcaaattcaatttggaattatattgttgtcttaaatgtatcagttttttcaactcttctgtagttgctatatgttggacatttgaagcatacggagtttcacaattgaaattcaattgtaagattttattcattggagtggattccatttgaacttgatcatatggtttctgttgaaaaaaatattcaatctgtgtgtgtttccataacttattatatcgatcaaccatatcagttgcattttgcttatttaaaaatgttatagtatgtgataatgatagtaagttaccataactcgcaacaaaatcaactttctcctttttatttcgtaatttgtagtttaaaaagttcgtaacaacagatggatatactgtttctaacttaggtgattcaatatgtgtatagtttagcaattccaatagtttatttgtattttgttgtttaaaggtgttatctgactggattaaatgaattatcctatttttttgcttactttccttggaatttaccaacactttttcaaggcaatcagtggtgtactcatccaaagggatattctttaatttccgagccaaattcattgtgacaggtcactataattgccagtgaaaagatgttcaaactactgaaatatgacgaatttttcaaaaatttcaaaatttccatattgacatgaaattctcaaaagggaaattaattatttgtttaccttaattaaacttcttcttcttctttttcttttgagattatattctaccttttcttctgtggttttagactcagttcagtgctagttgttgcaattaacatgtcagataataaacagattcatcgtagcaggttagctcatttgaatgctgcaagagacaaggaaaatgcccttagatttcataaaagcaattttaatagtaataaagatttaaaaattgatgtttcaaagaaagaaacagttgaatcatttggatttggtagaccaatcttacgttctaaatcaacaaatggattgaaagtaaataacaatcataatcacagtaataatcaaaatatcaattcaattcctaaacacagtataccattaaacaccaaaccattattccctgaatcagagaatgctaataaatcaagaaaaatcaataaacaaccaatttctatctttggaagtatagactctaatgaaaatgaaaaggaaaatgttgcatatcatgatactacaacattgcaaaggtcacattcacatatggaaattaatcataataatgaaaataatggtactttcaataaacgtaatactctctcaagatcatcatcagcttttggatcatcatttggatcatcattcaataattcactgaaaccaagaattaaatctaaattaacactgggtgctgataatgatatggcagcatttttcaaatcatctaaatttaatgatcaaaagcaatttggaataaataataaaactaccaatgattttgatactgcaattgatgggaaggataaaaataatgatagtttcaatgatagtagtatcgatatcagtagactggaggaagttacatttactgatgataatgatgatattacaatgatgaagaaattatcaacagatagaaattctcctgtttatcaaagaactcataaagttagtatacatacattattatcttcctcaactgataacgatgatattggagaaactacattcgattataaagatactgagaaatcaaaaccttatacactggttgatctggaaagtttaataatgtctaaacatcatgaggttttagaaccagaacctgaagttgaaattggtaaaatacaagatgatgaatttgaaattgagcatataccacatcataaaaatggaatatatgatgattctatccccgatgctgtattagatggagaatatcaaagtatgaataatgttttaggaaatctatggagtaaagataattcagcaagttcaataagttcaacttttaaagatccacttgatttaaagttcaaagaagaagataaaaaagaagatattttaaatagtatacaatctagtaattttgaaccagtattagattttgataatgcactgaaattagagttttctgatattgaagaagaggaagagggtgatgaagaagatggtaatgataaagataaagatattcaccaaattttaaaattctatcaagataaatcaactatataatttaaatctatagacctatctataaaactatatattctagtatgtaaaataatcattagctttgtttttaaatatattctattttctattctatgcttctatgtacaagtgcatcaccatccaaaccaaccaaaccattttgattttgaatcagttccaaaatttttaacatcagtattattgatataagtattgaaagttttaggaacactatttttatcctttatttgaaatactgttggttgactatcatcatcattatcatcatctgcattatttgaagcatctttacttttactttcattttctttactattaacatgacctaatacatcaattaatctatttttatcatttctctctaacatccaattatcctttgggaaaattatttcaacaccaacatataaatcaccatgagatgaaaggtaagaatttggaattggcataccttcacctttaataataattgaatcaccaggttttaaaactttacccattggaattttaatatttaaccatctattatcaattgttttaattaaacgattattttcaaatccacataatgcatcaactaaattaattgaaattttcgtaaataaattatcaccatctctgaaaaacattgaattattatttaattcatcatcttgaataaatttaaaatttaaaattgccttaccagttttaatatttggatattcattacccatactactcatttcaaccgtaccaatatttggtgaacctttttcaattttaaattcaacaatattttcatcatcaataactaaattacctttacatttcctacatttatcatcaggtcttgaataaatacctaaaccttcacattgattacattcaactctttgagcaaatgtcataccacccattcgacgatattcttgtgtaataccttgaccattacaaattggacaagttattttaactgcatttttccttaatccattacctttacatttaacacaaataattttccttttataagttttcttaattaatttaccaaaataaagatcagataatgtaacatcaatatcaaaagtaatatctaaatctttacttgtttgacgttgattaaaatctctatgattatttgttttcctattaccatttccaccattacctgtgaaaaattgtgcaaaatcgccttcatcaaagaaatttgcaccatgtcctccaccattactaaattcaaaatcaaaatcaaaatcatcgaatggattaccatttctattattatttggtcctccacctaaatcatattcattacgtttatgttcatctgataaaatttcataagcttcagtaatttctttaaatttaatttcactttcatctcttaattcaggtgatactttatcaggatgatatttaagtgccaatttcctataagcttttctaatttcaccttcagttgccgatacttcaacacctaatacttcatatagtctagtcattgctttatattaagcttaaagaaagaaattatagatcaatattaatattaaataaaaatatactccacagtaaatcattttacaaagatttccttacataatacaaaatttcacaaaaaggtgtttaaatagctaaatagatagagtttctatgtttacaccaatggttcataagctgaattggtttcatttggagatttctcccattgatgaacagtcataccatcatgaagtgtaattgtttcttgttttaatgaataattgaaaaaccaaggtaataatttaaacatgaataaccagtataacatgcataaaaataaaattaataatgaagtaattgcataatttggtaatgaactatcactatcactatcactatctttagatgattgaattaacggacctaagaacatgaaaattgagaataaaatcatgaatgaaatatctaaatatgatgccttaatatgatgatcattttctggatttcttttacgtaaaattaaaataccgaaacaagctaaaccaaagaaaatttgtgttggataactctctaaattaattgcataattgaaaatatttgaatttgaaggtataattagaaatattgaagtaataaagaatggaattaacattgaagttaatggtgaattaaatggataatttgatgcaaagaatttactaaatggcataaaaccttctctaaaaatttcttgattcattcttgaaatatgatataaaactgttataatattaccaccaactgagaatgcaattaatgatgataaaataattttaccaaatgaattaccgaaaaatttttcaaataaaactaaaccaaccatttcattaatttctaataattcatctgatggtataacaattaaataagttaaattaattaataaatagcaaatattaattaataaaattgataaaggagcagcaattttcattgtattaattggatctttaatttcacctaaaacattatgagttgtatgccaaccattaaatgagaaaataccttttaaaattgctgaagtaaaggaagcaattgtaacatttgttttaacattgaaaaaatcttttaaatgtaaattattatcaattttagtaattgatgaaggtaaaattaaaacagataatcccattagtgaaacacataaaagtaaaataattttcaaaaatcctgtaattgtttgaactttaataacaaattttgttgaacataataaaagtaaaatagttaagaatagaaatgcaaatccaattggtttactataactttccataactggaccatcatcgatccctacagcataaaggaaatattcaccaaatatgataacatttgcaataattgaaccaaatataacaatgaaaataccgaaaacaacattaattaacataaaaggtttattataaataattgaaagaaaaacttttaaaccaccagaacgtggtataattgaacctaattcagagaaacacattatacctgcataacttgaataacctgcaattaaccaaactaaaaagaataaaaatggtgaaccaccaacatctctataaatcattgcaggtgttgcaaatatacctgatccaataattctttgaactaccatcattataacatcagttacaccaagatgacgtccatgaggggtttcatcgtgtgatatcatcgtttgataaatgaaagataattaaagtaagatattattattaatcaattataaacaaccttaattaaataaataaaactgtggattactgatatatagtattagataacaacaagcaggagattacgtaagaacatgcagattatatacgtatcatgtcttatatactcagactatatatgatactctaccacatgtacaataagtatactataatagaataaacataaagaacaaataataaaagaaacagacaaaagaaggtcaaagtaagttactgaccaaaaaaaaagtcaaatttttatatcaacataataaggctcatctctttatatccacacaccttctttcatcaatgccagtaacaacagttcagagagccactattcaaactcccaatggatggaatgaactctcattaccattaacaatctatcaaactggtcaaaacctatatttaggaaccaatatgatttctaacataattaaaatatatatcagaggaaatgatattttaattaaacatgcacaaggtaaattacaaataactctttctagtacaaatgatattaatgaatggtgtacattttggaaaaatattggtattgaagtaaagtataaggatgataatgaattattaaaattaatcaatgataaattatcaactaatgaatttaaattacttgtaagtatggaatatacagactctgttatacaatataatatatactaacatttttattatagatggataggattgataaattattaagccaataatgccataattgttaagaaaatagcatgaggaacataaggtgtaattatattaccatttgcttgtgatgtagaactaattgaagaaacaatattagatgaagatgatgaagtggtagcagatgatatagttgatgatgaatgacttgagattgacgcagttgatgaaggtattgaagaaattctacttgttgaaacaacttgtgatgaagcaattaaatcattattagttattgtcataacatgataatcacttggaactttaaattcagtcatacttaattcattcatataagtacttaaccaatcaaaatttgtaataaatgttgcaaattgatcaaatgggaaactttgaataaataaactagttgcaaaattatcaacttcataagtatttaattgaatataaaattgcattaattcaggtgggaattcaattcctttactttgcattacactttgatatttattattctcttgtaatgcatcaagtaaaactgtattaataaaagtttcttgttcaacaattgcatatgatctttcttcaagtgtatttgttaatgttgtggtaataacatttgctaaaatagatgtaattaatccactgattggtattaatgttgataacttcatccttgatagtccaagtacattaccattggaaatatattaaatggtggaattactgtttcttttatagaaataatgttaatattacccttttgggacatcaaagaagaattatgaaattttcatttcatttcatttctttttgcaaatggtatctagctattttaatatctacttagggattatacaatgataatgataatgataataatattaataatgattaagaaaaagaaaaagaaaagttgcactacacaactaaccacgtaagaaaccttttcttgtcttagttggttgttgttgttgttgttgttgagaatttagtaacattgaagattgttgttgttgttgttgagtatgactaacaccagttgaaccattttgatcaatcaatttattatttgattctaattctttctttttatcttctaacattttaatttgttttaataatttatccctcatttctttatgtttactaaataaatcagcttcagtttcttgtaattttttctcttctctattaactttttgttgaaaaatttgtttcatttgattctctaaattaactaattttaattcatgtaattttttttcttcctcttgtttaagaattggatcaaattctttgaaaactgaatcattttgaattatacccattttagttaatttatttaatctataattttcatataatttatttgatgttaaatcttttaaatcttccatataatttctaattaataattgtcttaatttaataaaatcattatgtaattcattatcaatttcaattttaccccaaggatattctctacctctaacaaatctaccatcatctaatttaattaaattatttgaaccaacaattgcaaatggcattttatttaaaatatttaaattttcatcatcttcaatattattattattattatcatcattttcatatttaattggattaaaaatattaatattttgattttttaaatcatttttaatttttaatttaaaattttcaacttcagtttcattaagtatatcagattttgcaataattggaattaaattaactttttcatgaattgatttcataaaattaatatctaaagattttaatgaatgacctgttggttcaataaaatataataaagcatgaattctttcatcaataaaatcatttgataaattatttctattaattttagtttcataatctaaataagaatcaaatcttgaatcaatttcatcaataattggttgaaaagaatttgaattattaataaattcaccaaatcctttacaattaataatttgtaaatttaatttaacattattttcttcaataattgaatttatagtttcaatttgaattttatttaaatcttctaaaggtttaatagttgttaaatcaaataaatctttattaaataatgtattaattaaagttgatttacctaaacctttctcaccaacaatcattaaattaaaattaaaaccttttctaattgatttcctatgccattgttttggtaaattagcaaatcctacataaccatttaatttacgtttaatgatttgggtagtatgatcattagaagggagtaattcagccattgttactattcctgttgtcttaaagaaccaataacagagcaagatcaagatcaagatcaagatcaaaaaggaaaaagtggcaaagaatccaatgtaaacacagtctgaggaaaattgcccatttcgtaataaaataaaattggaaaataaaattaatattacattaaattaaagagacgcgttgtgtattaatagaggtataatagaggtataatctcttatacacggacaatgtacacaccatcagatagtgttaggaagttagtagaggaaggggcagaatgtatggccaagaaacaatgggaaaatgccgttgatgcgtatagtgaagcatgtcaagtttataatttagagaatggtgatgatagtggtgaattattagttatgtatgcaaaagcattaatagagaatggtattaagaataatgatgttattgctggagagacgggtgaagaagggggagagggggacgaggaagaaggtgaagatgaagaggaggagggtaaatttcaatttttcaatggagttgcagagaaagatggtgaagttgaagaagtagaggaagaagaagttaaagaagcagaagttaaagaagaagctgaaatagatgatggacctaatgattttgaaattgcaatggagatattagaagttgcaaaggaacaatttattaaacatgataataaaatacaaatagctaatgtttatgtattacagggagatatttatttagagacagatcaaggaattgaatcaatgaaaagttatcaagaagcagttaatatattacgtgatgaaaaggatgatattaaacttgcagagacattagttatgttatcaatttcacaagaattaaatggtgaattagagaatgcaataaaatctatgaaagaatgtatttcccttggtaaagaatggaaaagaaaaggtgaaatggaggtacgattagatgagttaagtaatagattaaccattgaagaaaaggagaaggaaaagatgaaagaaatggctaaaagagttgttgaaagtaatgatttaacttcattagttaaaagacgtaaaaaatagcgagtattagacattctttatataacactttctttttgtaatgacatatccacttaatttagaactaccatgggtagagaaatatagaccttatacacttaatgatatagttggtaataaggaaactattaatgcattaaagaatattgcaaaagatggtaatttaccacatttaattattagtggattaccaggtattggtaaaactactgcagcattagcattatcaagagaattattaaataatgatgaaaaattaattaaagaagcagttttagaattaaatgcaagtgatgatagaggtattgatattgtacgtaatttaattaaaacatttgcacaaaagaaagttacattaccatataatagacaaaagataattatacttgatgaagcagattcaattacaagtagtgcacaacaagcattaagaagaacaatggaaatttattcaagtagtacaagatttatatttgcatgtaatcaaagtaataaaattattgaaccattacagagtagatgttcaattttaagatttaataaattaggtgatgaagaaattttaaaaattttgaaaagaattttagataatgaaaatattaatactttcactgatgatggattagctgcattagttttcacaagtgatggagatatgagacaaggtattaataatttacaaagtgtttattatggatttaaaatgattaataatgaaaatgtttttaaattagttgatacaccaaatcctattataattaataaaatgattaaaatggcattacgaggatcaattgatgaatctatagttatattagattccctaattgaaagaggacattcatgtattgatataattaatatatgttttagagttagtaaaacattacaagaagttgataatgaaacagttttaacagtgttacgtaagattggtgaatgtcaattgaaaataattgatggtgtaagtacaagattacaattatgtagtttattaagtagtttgtgtagttaagtagagtaatgtccacagtattagagagacttaaggccaaggaagctaagagaagggagactggagaggataagattagagcagaggcagttaagaggaaggttgtagtgaaggagagtgaaatacaggatattattagagatgtagtaagagaattaccacaaggtactagtcatataagtgttaaaagacttgtacaaatggttagtgatagtagagatggtaatatagatgttgcagttgttgaaaaagtagttaacaagatgtactctgtatcaatgaatgttgtctctcttgtgtaaagactttattatattaatatagaatattctcgaaaatttactcattttttcactccgatttcgcactttgggaaaaaattccattttttttcccacttttcttataaatgaccaacttcgtccattttatttctatttttcaccattttctattatttgccactttcattttcatttacgtctcttctttcttttagacaacccactcttttgataatgctttcatctgtttcaaagaacgctgctactaaaatcccttctaactttgttagatataactccaacaaggttcaaggtacagttattggtatcgatttaggtaccaccaattctgctgttgcagttatggaaggtaaaactcctaaaattattgaaaatgctgaaggttcaagaactactccttcagttgttgcattcactaaagatggtgaaagattagttggtattccagctaagagacaagcagttgttaatccagaaaatacccttttcgcaacaaagagattaattggtagaagatttgaagatgctgaagttcaaagagatattaaacaagttccttataaaatcgttaaacattcaaatggtgatgcttgggttgaagcaagaggtgaaaaatattctcctgctcaagttggtggtttcgttcttaataaaatgaaagaaactgctgaagcttacctgggtaaaaaagttacttcagctgttgttactgttccagcttatttcaatgattctcaaagacaagcaactaaagatgcaggtgctattgtcggtttaaacgttgctagagttgttaatgaaccaactgctgctgctttagcttatggtttagaaaaggatgattctaaagttgtcgctgtctttgatttaggtggtggtactttcgatatttccatcttagatattgataatggtgtctttgaagttaaatcaactaatggtgatactcatttaggtggtgaagatttcgatatctctcttgttagatatattgttgatgaatttaaaaaagaatcaaatattgatttacaaaatgatagaatggcaattcaaagaattagagaagcttcagaaaaggctaagattgaattatcttcagctttatcaactgaaatctcattacctttcattactgcagatgcaactggtccaaaacatattaacttaaagatgactagagctcaattagaaaaattagttgaacctttaattaagaaaacttatgaaccatgtaagaaagctcttaaggatgctaatttatcaacttcagatattggtgaagttatccttgttggtggtatgtcaagaatgccaaaagttattgaaactgttaaagaaattttcggtaaagaaccatctaaagctgttaacccagatgaagcagttgcaattggtgctgcaattcaaggtgctgttttatcaggtgaagttaaagatgtcttattattagatgttactccattatctttaggtattgaaactttaggtggtgttttcactagattaattccaagaaatacaactattccaactaagaaatcacaagtcttctcaactgctgcagatggtcaaacttctgttgaaattagagtcttccaaggtgaaagagaattagttagagataataaattaattggtaatttcacattagcaggtattccaccagctccaaagggtgttccacaaattgaagttactttcgatattgatgcagatggtattattaatgtctctgctaaggataaagcttctggtaaagattcatcaattactgttgcaggttcatcaggtttaactgatagtgaaattgaaaagatggttaatgatgcagaaaaattcaaagaacaagatcaagctagaaaggaagcaattgaacaaactaataaagcagatcaattatgtaatgatactgaaaaatcattaactgaatttggtgataaattagataaagcagatgcagaaaatgttaaaaaattaattactgaattaagagatttaattgttaaagttaatggtggtgaaaatgttgaagtttcagaaattaagggtaaatatgaagaattacaacaatcaagtttaaaattatttgaaaaaatgtacaaaaatcaacaatcatctgaagattcatcaaaatctgatgaatcaaagaactaattgtaaatataaataattaattaactaatataatatatatcttgtctataaacaaacaattttatgatgaactgaaataatttataaatttatcaaaatgattaatagtgtaaaccacaatacaaaacagtaatattactaaaaaattcttcaatttatgattattaggtgtaaatctccaaccaacggttaaagtaatcaaattacttacagttaatttaaaaatatcagtccaatcatagttcatactataaattatctttaaataatccactaaaccatcattatttaaaccaattataaatactgaccaccaaaacattaatgaataatatggtaaattggaattaatattaaaatttgcatatagaataattggaatataactgaatatgaagtaatataattgactaagtagtgattgatccattgatgttctacttaatgtcattgtagttttttggttgtattaagaaaaagcaattagttgaatccttgcagaacaactatacgtcgattggttttacaataaggtttattaatgccttgtgcgtaatcttatacttagataataaacctagaataaggtattaataaaatatggcacttataccatttactttactcgttatataaatgttctatcaattcattaaagatatagtatttgtccttaagataaagtaaaggtatagtaaaataaagcaatttagtaagtaaatttgagaaataatttttcactaagtaagtaataactattaagacaatctttcttttaagacagtgacaaatatgcagaatccattcctaccaccaccttctaaaccattaaatgagatgacaccagaggaacaaggtgaagcaggtgcaaaagaaattatgaattttatatcatcatgtccaggtaaggcaatattagcaggtggttcaggtttcgttcttggaggtgttttcggatttttcatggcatcaatgtcatatgatacaccattaggtattggacaaatgggtggagctgcagctttagctcaagaaaaatatttagaattaccattaaaggaacaaatgaaaattcaatttaaagatgtttggaatagaactaaatcaagtgcacgtaattttggttatattggtttaatattttcaggtgttgaatgttgtattgaaggtttaagaggtaaaagtgatttatataatggtgcagctgcaggttgtataactggtggtggattagcattgaaaagtggacctgaagcagttttagttggttgtgcaggttttgcagctttctcaactgcaattgatatgtatatgagaagtgaaaatggtgctccaccaaagaatgattatgatcaataaagaaccttgagtgaaacgaaaggttcgtatatgtcttcaatttgaacaagctttacgaagattaatgtataaaaggtataaatttgtaaatagaatatagagtaggataaataagataatatcatgcaataatactacttctaccttctctctctaatggaggtacagcattaaataaatcttttgaagttggataactacctaacataccctttgaacttgcaaattcatttgatctaattgtattagttgaataatattcatcctcaattggatgcagtaaaatatttaaatttgaaattgaaactgtactattagttggaactgaaatccaatcatttctttcaaatgttaatggttcacttgcaatcattactaaattttgtgatttattcattctttccattttataacgacctggtgaatattcaacaaaatttgatccagttgaaaaatataatgatgcagcttcatcagttttagaattaacatatcttgaaacaactatattaacaccatcagttactgcaaaatttaataatgatggatcattattattactatcaccattactaacttctttaacccaatctttaatatattgaatactatcagtaagtgctttccttaaaatatgaatattaacaatttctccactatttggttcaaatccatttaatctaagacaatgtaaaaataatgcaaagcaacattctgaatctgttgatccattaatattaataaataaatcttcatcaataaaattaattaatgtacgtttaatttttgggaaatttgatataccaccattatgcataaacattaaattattaaaagtgaaaggatgacaatttgtttcacttaaaacaccataagttgaagctctaacatgtgcaaatattaattttgaacttgtcttttcactaattctttgtaaattttgattattccaagcaggtgtaattgccttataaagacatggacttgaatgatcatcatcaatataataaccaacaccaaatccatcaccattaactggttgtgcatcaattcttaatcttgaatcatatgattgattaataatagaatgttgaggtctagtaagcagatgagatagagttattggttccttacccttgtaaatcaagaaacgacacatattaaaggaagaacaatcatataatataatgttgttaaaaccttcgattagtcacttgcatgaaaaaaagttattatctatttccacttcctttacttcttttacttcttctgacaatgagtgtgctacgaatagacccggaactggatgatgaaacgttgggtaatactatagagaatgcacatttatggcaatacattagtgatagtgaagatgataaaactattgaagaagaacttacaccaccaaatagtagtagtatatcatttgatgtgagtaccggggattatgcagaatgtttaattaccaaagtatttaagaacaagggatacattaattcaagtaattcaagaactataatggttgcatataaaccaaatgacacgctggacgttgttaaatggacaattaattcaattttaaatgataatgatatattggttgttatagaggttataccattacataattatttaaggactggatttaattataataaagataaagagaacttatttgaatcaatgaaatccttaattggtgataaatgtgttgaaatagtatatgagagacgtgttggtgcagtttattatgcaattaatagagcaattaatgattatgatgttacaatggtagttataggtaatggagaatataacaaggaaatgattgataaatgtaaagtaggagttgttatcgttaatgatttagaaattagagagaataaggatgatgataataataataataattcaaagacatttccaactattcaatcattaacatatgctataacttcaacaccattagatttaccaacaaagagaacttcaagattcctaagaggtgggaatcttaataatctattatcaccggtatcatctaatgaaagtatacgatctttatcaccttttaaactattcaaacgaaagtaatttaacgtctatattctataataatatattatatatacttcttctattctttagtatcataaacgatagtaactggaccatcattaacaatcccaacatccatcattgcaccaaatacaccatctttaacactttcaacacttaatccatcccttaattctttcaagaaagcttcatataattcattagctaaatgacctttctgtgctttatggaaatcaggttttgtacctttcttgatagttgcataaagtgtaaattgtgaaactgataatatttcaccttgaatatcaataattgatttcatccatggtttaccaacccattcagttgatgtaccagctgattgatcaatatcttcaaataatcttaatttaagtattttattagctaatttactaacatctgcaattgtatcttcctgtgtaataccaacaagtaaacataatcctttaccaatactagacactacagcattgtctactgtcacagaggcactcttaactctttgaataacaactctcattgtataaaaagagtattatacaagcttatacaccttccttaatagtgataagtggaaaaagtgaaaattttcattttcattgttatttattatctaaaatcttccattggacgataccattttctttctttaaagtatatcctatactgtatcatataatacagctaatgatgtctgatcgtcgtccatctattgttgaaagaagaccttcatctgcattatcttcaagacgtccttccattatacctcaattagaagggattgaaaaacctaatactccgaatttaccggagaatatgaatgttgatgttttaatttgtggtacaggtttaattaattcaatattagcagctgcattatcttggcaaggtacatctgttttacatattgattcaaatccttattatggagatgattcagcaactttaacaattgaacaaattaaaaattggtttattggttcaaaatttaataaaacaggttttaaaaattataaaaatattcatttatatattaatgataatgattttaatattgtatcaaaagattatggtattgatttatcacctaaaatattattcccacgttcttcattattagatttattaattaaatcaagagtttatcattatttagaatttcaaagtttatcaaattttcatacttttgaaaataataatttaggtaaattaaatgcaaataaggaagatattttcacatcaaatgaaattgatttaaattctaaacgtaaattaatgaaatttttaaaatttatttcatctccagttattgaattacctgataatttaccaaaggatataagtattcaaaattttctgaaaaaaaattttaaacttgatgataaattaattaatgaaattattttcaccttaggattaattaataatcctaaaattcaattaattgatgcattaaataaaattaagagatatattttatcatttaatatttatggtaatttcccaacattatattcaaaatttggtggaccaggtgaaatttctcaaggattttgtagatcagcagctgttgcaggtacaatttacaaattaaatactaaattaaaatcttatgattttgaaaataaaactgcaatacttaatgatggatcaaatattaaaattaatgaaagaattatttcaagtttaaatcaatcaattaataaacctgaaaattgtaaattttatgaaatttcaagaattattgcaattgttgataaatcatgtaatgaatggtttcaaaatggtgaatcatcatcaattataattttcccaccaaattcattaaattcacaaaatgaatatcctgtacaatgtttaataatgggtagtgaaactggttgttgtcctaaaggtagatcaatttggtatttacatacaattgcaccaacaattaatgatattgcaattaatgatttaaattcagcattattaaaattagaggaaaattatattagagagagtacatttaattttaatgaatttaatgatgatgatttaaattattataataataataaaccaattttaacagagagtggatcaatgaaattaagtaaaagtttacttgattttaaatttaaattttcaaatgaacgtattaattatttaatgaaattaagttttacacaattaacaaatattgatcaattaaatcctgaaaatattaatggatataataaagaaatattgaaaactgataataatattataattgttaatatgccatcaagtgaattatcatatgatggtatagttgaagaggcaaagaaaatttataaagagattgttggtgatgattctgattttttcaatgttgattttgaagatgaagaagaagagattgaaattagtaatgaattagatgctgaaataaaggcagaagtagaagaggttattaatgttgataataatcaaactactcaatctaatcaacaaagtgaagaatttgaaatggaattagagagttagtattgtgtgtaagtgtatatataatataactagtataataatattaaattaaatgtatgaatttttgataaagattaagattattaattaaacttataatatataaattaatatacatgtagatacattatttaaccttgtaaagattctaaaagaatgtttctttcttcagtatctgcaccccatttagtgacaacaacacaagaagcaccgacaacttttctagcattaccttctctatcaacttgacataaacctgcccattcacctaattgtttagcatcagaaactttaattaatggaactttttcatcaccattacataaagcttcaactaaagttgagataccttcttcagtaacagcatcacaaagaacacataattgagcttcacctctagttaaagctttagttgcttctcttaaacctcttgctaaaccatcttgaactaaagcagttcttaaaacttttttaatacaatcttctaaggtaactgaagtttcttcttcaacgacaacttcttcttcgacaataactggttgttcttcaatatcagacatgtttatgtatacttcttcctcagataaatccggtcagttgataaattagaaaggaaattaaaatatctaaaatattcaatctctaagatataacaaccattatgaaaaattcatgtaagtaaaccaatatagtaattatctcaaagtgaggaaatttgaaaaattttgtaaaacttttcactgtcacagaaaaacttcccaattgggaaggtacgcgtaaccctctctcacgtgactttaacacaagcccttgtgtgtggcacgtgatatagtttattttcttttacaacatgaaagataaagatcagttaaggtaatgtaaacattaacaattgtttattcttaaatcaatcagtcaatcaatcaattaatttctatatataccccccccccccccccctcccactatgaccaaaataactatacatcacggcattaaaccaacttcattcaagaataaaccaattcaacaaaaatggtttgatacattaataggacttttctattatggttcagtatccccacttttaactaaacttgaaaattgtgtttgctttttattatttttaataattgctttcctaattataattggttgtaaaaattatatttggccattagttagtgtaataaaattatgagtgcttctataaaatttttatattttatttatttatttatttaaatacataaaattttctatttctatatattatttaaaatatttgttaatgtttctttatcagaatttgttaattcattaaatgttaaattatatttatcaacttcatttgtttgaatatttataatgaatgatttaaattgctcaaatatattaatcttatctaaactattattagaatatggatcatcaactaattcatcaatttcatcaaatgaaaatttattatttgcatcaaatgaatattcaaatccttcatcatcttcttcatcatcaaagtctttaccttcatcaccttcaccatcatcatcgtcatctcctgcttcattaattttatatgttaattcattctcccaattcttatcagtatattcttcccttctcttttcaagttctttaatagctgttggtattttaaataataaatttgataaattattaccacatgttgataatatatttgttaacatcatattatttaatgaatttaaatcaatacttaaaattgaaatatatcctaaaattgataatttcatatcgaaaactcttttaaaattatttgtaaaattaaaccatttagttaagaaatattcaattgaattatcttcaattaattttttcattgttgtatttggatcaattataattgatgatataattgtatttaataattggattttaaaatttatacctttttcatttaatttattatcaatttttttcaaatatcttatactatatgatataataattggtaaatatttaccactaattgaattatttaatgataatataaatgttgttgttaaatcacaaatattaccaatatcactaaatccaattatatcatcatcaaattcatcttcttcattagaattatcacccatttggaaaactgttaaaataattttaaaaaataattcttgaatttcattattattttgaaaaatttcacctccataaattaaataatttttcaatgctggtaatgaatcttctaaatataatgtaatatcttcatcatttaataatgtattaataaaattatttaataatgaccacataattggtgatactttccttgttaaaaataatgtattttcaattaattcacctgcctcggcataaaaatcttcaattttattatcaaatataattttaattactttactataataaatttctaatttatcgattatttcagttgaattttcaaaatataataaaattgtaatcattgtatttaaaatacctaaagcggttgaagttttatcacttgttaaattttcaaattcatcataatcataatcttcatttgaattaacattatttgtaatttcattaattgaatttaataatgtaattaattttaaacttaattgttccattaattgttctgcaaatggttctaattgttcagggaatgattcaactaattcttgcataacacttggtaatatatcactatcaaatttatttgataaattcattaatttttccattaattttaaaacataacctgaaattaatttttaaattcttcattaacaataaatgtttgaattgataatgcactttgaatttcaattggtaaatgattattttcattattcaaaaaattattaattataccattgaaaatattattgattgtttcaaaattttttaaatcaagtgaatcaaattttgaaattaaattacatgttcttgcccttaaaaatgggaaatttgattggaaatttggtattatataattattcaaaaatggttcaacttcattatatacaggatttttaacttgtgataatttatatgaaattggtgataaaaatttcattaaactttccttacccttagcaatttcaattgtctcagtttgattatttaattcattaaatttatttataacaaattgaaacattggaactaaataatcaactcttttttcaactaatgtgaaaaaaaatgaatgtaatgcatcttcaccagtattttcatccataatatcaaatattttatgaatatattcctctggttcatcttcaaataattccaaatcttcatctgttggattgaaaattttgaaagatacattaccaataattaattcaaatgtggttcaattaatttaaatgtatctttttttaataaacattgttctaaaaattcaattaaataataaatatttgaatttgataaatatttaccattaccattggagccatcggttgaccaatttttcaaattttcaatataaacattgattaaatttggtaaaacattttctttaaaagtatgtctaaattcagaataatcgaattttgatgaaagtgattttgtaccatatctttgaaataatctatataaattatgataacaccatttttgtgatttaatccaaccaggtaatgaatcttcattaaaattagtattaataacattaacttggaaagtaatccaatcaactaataattgagttgattgtaattgtaatgggaaatccaaataagtgacaaatttataacatttaattattaattttaaattttctgaacattcaaatgatgaaattaaattttgataattatttaaaatttgattaccaatattaagaataattgggaaaaaattattaataattggatctaaagttgatgatctctcttgatttgatctccatctaaaatttctacagatttcagtaaatgaataaattccaatatataaattattaattgaaatttgattttctaataaattattggaaattaaaatcattaatatgatttaataattcaggccaatttttaggataatcatatttaataattaatgataatgcaggtaataattgatttcttaaatttttatctaatttagttataataactaataatctttcccttataattggtctctcatcagtatctataagtttaccaacagtccaatttctcaatattatatttttcaaatagatagaacatgaagttttaaacaattggttgaacatttccatttgaaattatatctaaacaagcacttgaaaatccaatttccccactgaaagccttaagttgagtctcactttgacctctaatattaggatcggcctgtaaagaccctaggaaacactcatgcaacctctcaacgtccatccttgcctaaacgaaagccttttcgaagagaaaacctagctgagcaagctgagcaagctgagcatttcatgaaaagcagtgaaaaaggcaaaaattaaaaaaattgcaaatctgtgcaccctcataaaatttcccttcttcatgaatttatcacctatttcccctcttgtatctcttgtttaagtataatataatctcttctttaggacaaacaatacaatacaatgccattcttagttacttatagaccggcagtcttactcttcttctttatcagacaacccgttgctgctgcttccattgttggaatgtttgctctttgggaagctgatagaaatttaggtttaggtataagagattctttcaatgaatggagacaaaatcaattaggttttgcaactgttactacacaatatgaagcatttaagagaatagatgaagctaaaagaaatgaaatgttacttaaacaataagtaatttctcaatatttatttatttaacctaaatacacactttatatcatattattagccaaaaaaaacgattcattatttacaagtaataataataataatacactttatacaaatctctctttataaacctccctttttacttattctgtaaagttcaaaaattgcagcaggtgtaataccttgaattctacgtgcttgcccaatactttcaggtctattctcatttaatttacttataacttcacttgataatgatggtatattcctataatcaaaattatttggcaatttcatattctcatctgccttgaaagctttatatattccttctcctttttaatatacccttcataattaccttccactgttattttcatcttaattctatcatttaattcatcatttaatttagaatcatcaataattttcaataattcattaattgatgatcctttataccttaatatctcatatgcagattttaatttggaatcattaccaatattaatatcaggtaataaattattccatttattactacttaatttaaattctcttaatttattcattccatcattcataatttttttatcattactaaaactttcccatctttcatcactaatacaatttaatttcttacccatttcagttaatcttaaatcagcattatctgctctaacactaactctaaattcagatcttgatgtaacattctataaggttcctcaactcccttagtaattaatcatcaattaaaactccgaatatacccatcacttctatctaatattaattcctctccattacctctctcacttaatcctgcattaatacctgcaattataccttgacttgcagcttcctcatatcctgttgtaccattaatttgtccagctaaataaagtcctgaaattaatttagtcctctaatgtacttttcaattcccttggatcaatataatcatattcaactccatatgcaggttttaacattttaacattttctaaacctgtaatattctttaaaatctcatattgaatatcttcaggcattgtcattgatataccattaggataaattatatcatttttaaccatatctaactttcaggttcaagccaaactctatgttgtaatttatctgaaaatcttgtaattttagcctctaatgatggacaatatctggacctttaacagtttcccttatatggaaagttttatctaaattattcataattaattctttaacttttggtgttgtataagttccataacataatatttgatctttaatatttggtctttcattaaggaaactcattggttcaggtggattatcacctatttctttactaactaaattataattaattgatttaccactaattctaggtggagtaccagttttcaatctacccattaaaaatccaatttttttaaaagttttacttaatccaaaacttgaaatttcatcaattctacctgctttccaagattttaaaccaatatgaatttcaccatctaaaaatgtcccagtagttataacaactttatcacatctaattaatgtaccattcagtttaatacaacacctttcactacacctctatttctacctaattgatcattattttcatcataatcaataattaaatcttcaattttcccctcaattatatttaaatttttataacctttaataaactttttgcatttccattgaatataaatctctatcaatttgagctctatacccccaaactgctgcacctcttgacctatttaaaattttaaattgaatacctgctttatcaacaattctaccaacaataccatctaatgcatcaatttcctttaataatgtaccttttccgatgcctcccaaatgcaggattacaactagttgcgccaatattatcccatttaggggtaattagagcagttttaataccacatctagcactacccgttgatgcttcaatacctgcatgtccacctccaacaactataacgggatgatagatagattttgataacttattggatatatctaaatcataatgtaatgatcttttaaatatcttacttaacataatgttgatggttaatgatgaatcaatgattaatataagataaaagttactaaattgagtgaaaaattttataatttttttgataatccatgtttatagttacgtaatgatatcttataggtttatcatgtattgtattaactgtgtttaatgtattttaagagaatatgtatgtagttaattaatcacgagtatgatgaatagtgtctgtagtgtcaatggtttattttttagtaaattttgtaattttaaataaaattatgttactaaactttgtaatatttcttaatttgttaaattattattcatatttgtgcaatataatcaatatttatcattttttacctctattttacactagataacatatttatcagatagagtaagtgtcaattagtactatagacagtgaaatacctttgagtaataaatttgcatgtggtttcatgaacaaattctaaatgtcgtgacaataaaacatgttgtagtagataatagcgaaaatagataaggataatagaaatacttcttctatattataggtttataatataactgtttattatttatatacaagagtaataatataaaatgtataaatgtataaaagataattaaattaaattaaattaaattaataaaacttttcaccttgatcaacaaacataccattaaatccttcatcacttggtaatttagtatctaaaggtttatataaataccaagcttttaaagctttattaaaagatttaattctagcttctcttaatgaacaaccttcagcagttgataataaattttcaccactaaagcaaccaacaacataaacaggagttgaagataatctaccagtttctgaaattaatttaacgactggaggttgtaaattatttgattttaaaatttttgataataatttaccactttccttaaattgaaataatgattcaatatcaatttgtcttgataatatatgattattaataaaattttttattattaaatcattattatttgaatgaatatataaacctgcaattattgaacgtacagaatttgcataagcttcagcttttgataattcaaaagtatttgaattttgatcatttgaatatttagtaacattaatttcaggatttgttactttacgtatatatcttaatttaccaaatttgaaaatttctggttcatttgataaatatttatctaattttgaagttaaatcttcttcaataccccaattatttttagctaaatcatataatgaaaaatctccaatatatgaatcaattgccgattttaaaattgaaattggtaatcttggataatttgtcattaaatattctgatatataaaatgataaaatatgagaacctaaaattgataattgttgattattagaggataaatttgaaaattcattagttggacaagttaatgatttaactaatgtattaaaaggataattttttggtaaatttaatcttgcatgtaatgcaacaattgaaggtattaattttgcttcatcatttgaaagaagtgatatactactactactactattattattataatttgagaaatctaatttattttcaggtaatgataaattattttgattaatttgtttattctttgcattttcataagagaatttaaatttatgattaactgaattattatttaaattattattaatagtatttattttagaaattgcaggagatattgaaataaatctctttgcaatatggatagaagaacgattagatgcaagcatgtcctctattagtttgatattacttctactactaacttcaatgaaaattccatgataatattccaacacttagtgaaaaaaagtgaaaattaaaaaaaaatggacatccctaagagaaataagatagacgcatcgacgcaaagcaatcgcccactcgacgcgtctataacacaacaaacaacctgtcgcgtcgaagagactatttctaattttttcaattacttattctctcattggtaattagaagaggggatctcatattaaatttgttaacatgaatttattataatgtaaaaggtattgtattcctatagaaatctttccataagaacaactatgtcacatcctcaatttattcctaaatgggttacacctccaactggtggttggtttcatactcctaaaaatcatcatgctaatggtataatagcatttgcaggtttctttgcaatactttatggtttttataaacaagctgaaaaaaatacaattaatccaaaggaagcttattcaatggaaactgttgctaaatgggaattagctgcaaagaaatagttacttacctttatatacttatacttatttatttaatatacataaacttttaaattaggattcttatctttaatttttttaattaattcaaatgtttcacaataatctaaaacactacgtaattttgaatcaatataattatctaaaataattgtatcaatttcctcttcctttaatgttaatccatcttcaaaatttctttcaacatcatttttacttatctctaaaattttatcaattctttcaactgttgaatttaaaattctactccatgttgtctttaacatttttaaatcttgtccaattggatttttattaattaatttaactgatccaccttctaaatctcttgtagctctatgaacatcacatgatctaattgctgaaattgataatattaatataaattttcttggtggaatttcaactgtcttgttgaattttttattaaatttcttcttcgtttcaaatttcttaatcttatttcttaatcttttatattctttaatacttggaattaattctttcataaaagtttcaataaaattacttaaatttgttaaatttttttctttattgtattcactcgtatcaataacattctccttcttaagataataatcacttaattctaatggtgataaatttgggaaaatttcacgaattttactacttatcttttcaacaattatatcattcttttcattacttaaagatttcttattctctttctcaaattccatcttttgtttcttttgtgatttactttcttcacttttgttttttctctttttaccaacaactattgtagtatcttcagtaatatctgcagtagtatcttcagtagtttcttttggagactcctcctcttcttcaatttcaacaccttcttcatcatcacttaatttataatcaacagcaagtccatcatctaatccttcaacatcttcaactttattcttcttttctgcaacagtcatctttgtctacactaaaaagaaaagaaaagaaatctagtaaaaaaagattaaaaacatttttcaatgaattaaaaaaaaaaaataatttttatttttctacacaataatagaaaaacacggtattcaaccacaacaatctcttatcaaccaatgatatcacaatcaccacaacgaccaacaactccacattcaccacataccccaagatcccctcgatctccaagaactccaaggaaatctttaactccattaactaaaagagcattggaaatgtcagtaactccaataagaaatagattgttattaacaccaactaggaataatttaaataaaatttataatccaattgatgatttaaaattacttggtcaattatttaatatagataaaaaaaagacagagactactaaaattatttcaccaccaaagatttcaccacttaaagtttcaccacctaaaattgtatcaccgaaagtcatcactaatataccaagttttgttaataaagatgtaagtaaatttgctagaaattattcaagtagttttaatgataaattatcatctgatattgatattgaatcatcagaaatatctatggttattgatgatacattaccaataactcaatcacaatcacaatcacaatcacaatcacaacaaatacccgaatataatgaacctgaatatgaatatgaagaagaggagatagatactacatttgaaaaaactgcaaatacatcgaatttagcattacctgaagcaataatacgagatagatcaggtatttatggagtttccgatgaggaagaagatgaagatgaagatgaagacaaagaggaagacatacccagtgagattagtgattatgaaatggatattgatattgatccagtaccgataccatcaattgacaactcctttactatccaaccaataaaaccatcattaaaaccaccacaatttactaattcaacaataaagaaattatttacatcattacaaattaaagaaaataatatacccttagaattatttaatgaattaactaataaatttattgatatggaaataatgggaagtatagataattcagaaaatttaggatttggtaatagattaatgattgatacagataatattgataatattttcttagaagcaataaatgaatgtgatttagaaattgtacgtgatttagagagtttattatattctaataaatcaatacgtcgtagtaagagtaaagttaataaaccaatgaataaggaattatctataagtattggaattgaagcagatagtgattctgatgaatcaattgattataggataccattagaggaagaagagagtgatgtaagtgtatattagatagatatagatattacgtaacaaatcaagaaattggacgttcaatgtcaatgtcaatgtcatgtcatgtcatgttctttctttacggacaatgacagattatagtaatttattaccagtatccacacaatggaaacaatccataactgatttccttacagaggatattccatcatttgattatggaggatttgtagttggtagtgaaattaagaatgcatcaatttatatgaaatcaagtggaattatttgtggtataccatttattgaagaagttttcaaacaatgtgaaattaatattaaatggcatcataaagagggtgaatatattgaaattactaagggtgaaaagaaatgtattggttcaattactggtaaatcaaagaatattttacaagctgagagagtttcacttaatttattatcaagattatcaggtattgcaagtaaaagtaatgaaataattactaaggcaagagaagttggatatagggggattattgcaggtactagaaagacaacacctggattaagaattatggaaaaatatgcaatgttagttggaggttgtgatatgcatagatttgatttatcaagtatgattatgttaaaggataatcatatttggtcaacaggatcaattacaaatgctataaataatgcaaggaaagttggaggattttcaattaaaattgaaattgaagttagaaatttaaatgaagcaattgaagcaattaatgcaggtggtgatataattatgttagataatttccaatcaaatgaattaccaattgttgctaaaaatttaaaggaaatgtacaatgatcaaaatgataagaaatttttacttgaatgtagtggtggattaacaattgataatattggtgattatttatgtaatgatattgatatttattcaacaagtagtattcatcaaggtacaccaattgttgattatagtttaaaaattgataaatagaatatatagtactataaaattaacctcttttattttggtaattgttcttgttttgcttgttgttccttttgcttttgctttgcaacaacataaactaaaccagctgagaaacctaagaaaattgatgaaattgaaaagaaattaattggagcatcaaagaagattaaacctgataatgcaattggtaatttatttaatgcaccaaccattgaataagtagttgaagatgtaactctaatacaccaacctgaacaataagaaataccaacagaagttgcacctgaaataatcattgctaaccaaacacttaatcttgcctcaggtgggaaattaaggttaatattttcagttgaccaatcttctaataaaagtgaagcaactaataaaattggaattgataataaattattataatacattgtatcaaaatctttaaaattagttaatttaattctttttctcatgaaaagaacaaatgaagcagaagagaaacaatttaatgccatccaaaaataaccaatattaaaattagatgtaccagtagttgaatcaacatcaccataagttgcaacaactgatgagaaaaccattaaaataaatgaagataatgccattgatgtaacttcaccaccaaaccataaaacttcaccataagcaattaaaataattgttaaatttttaaaaattgtataaattggaattgataaaaattttaatgctttagatgaagtataaatcattaaaactaaaaggaaagcaattggtgaccattttttcgcttcattaatattaaattgtctataagttataacaccgaaaaattttaaagttgcaattgcaattatacaaacaattgattgaattgctaaaaggaagaaattcaagttaaaatgatgaccagagacaacatatttattagttgttgtcattaaaattgaggaagcacaataacataaaattgagacaggaccagaattaactaatttagctaattgagaaggttgatgagatgaaacaattggagtttcatttacgacagactctttcttttcacttgacatggttgttaaagagagagagtatgataaaagagaagtattttaaaaacagcaaagaagaaacaacacacaaacaactaataaaataaaatgaaaacaaatcagttgctgcttaatagaaaaaaagcagagaaaatggacaacgcgaaattattaggaattttatagcgtgtatagaggtttattattattattattattgtctataggttaagacagttagatagttagataatttatttatttatatgccggtttataacaatttgaacttcagggaagttaaaggggatgatgggtttgttgttatgaaacctactaagagaaattcaaattctaaagtaagtaaatcggataaaccactaccaattgctaaacgtaaaaaggttaaaatcaataatcatacacttgataaagctgtaggaaatgatggattcattgtaatgacacctacgtctgtacctacacctacagctaaagaaaccaaatcttctaatgttaagaatcgtccaatgaaaattatgcaatgtgatggacaaggaaattctaatgataattctatatcaaatacatctcctataatcactgatagggaattacaaattattcttgatgttgaaagaaatgaaatggaaaccagaaatattatgaataatgagaatgttgatgaagatgtgaattcacttactgaaattgagttacgtttactcaatccaaatcttcataaattagctattcattttaaaaagtactatgataagatcatttctcattttaattcacctcaagatgaaaggaagtcattggttttaacatttaatcattatatgagaagatattcttcaaccgattcaccgaatgcagatttaattgattggttctataacattttagagattaattctggttaccttacctgcaatatggattttcttgaacttggttattttaaagaagtatttaaaactttttcaaatccaaattatttgaaaactgctaggtataatagattatatggtaatgaaccatataaaattcacaaaaattttgaacaacatttgtttaatgagttacaaaatagatctaattttcaaaatagttattttgatatgatgtatttttctgggaaagattaccctggttttatgagattacctatttctgtgaaaagaaatatgacaattgatgatgttaaaccattaacacaagaaatgattgatgaaaaaatcgatgaaactcaatcttttctttctttgatttatatatttagagaagcagtaaagaaatttcgtttaaaatttaatattactataccagtcgaccatttagaaaataaattggattgtgataatgataatgatgatgatgatgatgatttggatttaccagatgaagttataaaactgtttcttgccgatgaagaaatatctgaagattttaagacaattctgagggaggaattagcaaagaaaaaaccagttaaagaataattaggatcgattttatattgtagatactgttattaattatattatattatatactaaactatacaatcatttcactgatagctgtccaccgcaacgtctcatatataaagatacaattacaaaaatgtaagaacttgatcttatacacggtacgcctagagtgtgattgcatatatgtaaatattatactatatttaatttggaacagacatagtaatttcaacatcaacacctggttcaatagttaaagcagtaatatttttaactaatgaagatggagcttctaaatcaacatatcttttatgaattctcatttcataatgttcccaagttttagaaccttcaccatttggagtttttctagttgcaattgataatgctttagttggcattctaactggacctttctttgcaacattaaatttaactgcatttctaataattgatgatgaaactttttctaatgctttaacattagttgaagttaaagtaattctaattttagaaatttgttgtggttgttcaatatctttcttttcttcagacatagttatttgttaagagacgttgtcaagttggtaaaggaaataaaggaataataagaaactatataagatactaatactaatactaataccaataatattaagtaagtgaaaaatttcaaaaatttcaaaattcaaaaatttattcgcgtctatttattataaacgaaaaaagggttggctaacccttctacacatcacgtgtgcattacgtaatattaggcatttattatctatctatctagttatctatctatttaaaacactgtaccatcacctaataattcaattggtggacctccattacttcttaatttactggcaattaatctacctgatttccaactacctgcctcaattaattgtggtaatgataattcatatttactacctttaatacccatcttttcattaataattggtaataagtaatctaataaattaattgtaattgatctccattcaataattacatcatcatcaggtttaaatactggtatattatttaatcctaatatttgattacctaatttaataccattttgattatgttcattatcctttaaagaaattacattaaaatcaataaataatcctccattacgatattctggtaatcctgtcatatattgactattaagaattttaaatttaccaaattcaattaatggtttaaataatgaatatgttaaccattgtgttaatttatgaaatgtaacaattttatcatttttattctttaatggccatgcatctccaataagataattatcaatcttagtacgaccttcacttggccaaattggtattaataatttcattaatacatcccataaaatttcaatttcaatattcttaccctcatcacaatgtaaattaagataatcaactaaatcacctggtctattagatttgaaaatttcatcatcattaactaatgtttcacctaatttatttaataattttaatctaccttcaaatccattaatcggattcatttcactaatttgtaatccatcacttaattcctttcctgttaatttacttaatttatttccatcaactctatatttatcatcaccattttcattatttgaaaaaactccattaataaacatatggaaagttgcaattgcaataccttcagatctattaaataacaatccactctttttttcaatatatttccaattattacctgcacctgcatctaaaagtacactaataacaaataaatcaattaattttttacaaatttcttcatcatttaatcccatttttttcttaaattcattattaattaaatcaggtaatctattttcattacctttattaaaatgttgaaatctaccatgaattggaattgttaataaagagtcatttgttgggtaagttgatttaattgtttcaataacaaaattaacaacattatcaatattatttaaattaacattaaaattaattaatttattatttttaattaattcaagtgttgataaatttgtctctctaactgatttaatactatataagtatttaatttcctctggtattgtcattgtcctatgaagaacataactttttgttgaaaaggatacttatcagttttatttataggaggatttactgataagacggagttatacggttatcgacgggggtgtcggaaaatgtgagcggttttagattttaactttaaatttccgaagagatacatgaatttttccagtttctctgagagagaggttcttactttgtggaattgatcttagacaatgataagaaataccatacgatatagttctaatgttagagatttaactaaaacagtaccattgagattattaggatttcctaaaaaattagacatagaaagattaaataaattaaataaaaataaaagtcaaataattactaattatcaattaagtaatgaagataggaataaaataatcaatattactaattgataagtattagtaatttaagataatctattgtctaattttttaggaaatcctaataatctcaatggtactgttttagttaaatctctaacattagaactatatcgtatggtatttcttatcattgtctaagatcaattccacaaagtaagaacctctctctcagagaaactggaaaaattcatgtatctcttcggaaatttaaagttaaaatctaaaaccgctcacattttccgacacccccgtcgataaccgtataactccgtcttatcagtaaatcctcctataaataaaactgataagtatccttttcaacaaaaagttatgttcttcataggacaatgacaataccagaggaaattaaatacttatatagtattaaatcagttagagagacaaatttatcaacacttgaattaattaaaaataataaattaattaattttaatgttaatttaaataatattgataatgttgttaattttgttattgaaacaattaaatcaacttacccaacaaatgactctttattaacaattccaattcatggtagatttcaacattttaataaaggtaatgaaaatagattacctgatttaattaataatgaatttaagaaaaaaatgggattaaatgatgaagaaatttgtaaaaaattaattgatttatttgttattagtgtacttttagatgcaggtgcaggtaataattggaaatatattgaaaaaaagagtggattgttatttaatagatctgaaggtattgcaattgcaactttccatatgtttattaatggagttttttcaaataatgaaaatggtgatgataaatatagagttgatggaaataaattaagtaaattaacaggaaaggaattaagtgatggattacaaattagtgaaatgaatccgattaatggatttgaaggtagattaaaattattaaataaattaggtgaaacattagttaatgatgatgaaattttcaaatctaatagaccaggtgatttagttgattatcttaatttacattgtgatgagggtaagaatattgaaattgaaattttatgggatgtattaatgaaattattaataccaatttggccaagtgaaggtcgtactaagattgataattatcttattggagatgcatggccattaaagaataaaaatgataaaattgttacatttcataaattaacacaatggttaacatattcattatttaaaccattaattgaatttggtaaatttaaaattcttaatagtcaatatatgacaggattaccagaatatcgtaatggaggattatttattgattttaatgtaatttctttaaaggataatgaacataatcaaaatggtattaaattaggtaatcaaatattaggattaaataatataccagtatttaaacctgatgatgatgtaattattgaatggagatcaattacaattaatttattagattacttattaccaattattaatgaaaagatgggtattaaaggtagtaaatatgaattatcattaccacaattaattgaggcaggtagttggaaatcaggtagattaattgccagtaaattaagaagtaatggaggtccaccaattgaattattaggtgatggtacagtgttttaaatagatagataactagatagatagataataaatgcctaatattacgtaatgcacacgtgatgtgtagaagggttagccaacccttttttcgtttataataaatagacgcgaataaatttttgaattttgaaatttttgaaatttttcacttacttaatattattggtattagtattagtattagtatcttatatagtttcttattattcctttatttcctttaccaacttgacaacgtctcttaacaaataactatgtctgaagaaaagaaagatattgaacaaccacaacaaatttctaaaattagaattactttaacttcaactaatgttaaagcattagaaaaagtttcatcatcaattattagaaatgcagttaaatttaatgttgcaaagaaaggtccagttagaatgccaactaaagcattatcaattgcaactagaaaaactccaaatggtgaaggttctaaaacttgggaacattatgaaatgagaattcataaaagatatgttgatttagaagctccatcttcattagttaaaaatattactgctttaactattgaaccaggtgttgatgttgaaattactatgtctgttccaaattaaatatagtataatatttacatatatgcaatcacactctaggcgtaccgtgtataagatcaagttcttacatttttgtaattgtatctttatatatgagacgttgcggtggacagctatcagtgaaatgattgtatagtttagtatataatataatataattaataacagtatctacaatataaaatcgatcctaattattctttaactggttttttctttgctaattcctccctcagaattgtcttaaaatcttcagatatttcttcatcggcaagaaacagttttataacttcatctggtaaatccaaatcatcatcatcatcatcattatcattatcacaatccaatttattttctaaatggtcgactggtatagtaatattaaattttaaacgaaatttctttactgcttctctaaatatataaatcaaagaaagaaaagattgagtttcatcgattttttcatcaatcatttcttgtgttaatggtttaacatcatcaattgtcatatttcttttcacagaaataggtaatctcataaaaccagggtaatctttcccagaaaaatacatcatatcaaaataactattttgaaaattagatctattttgtaactcattaaacaaatgttgttcaaaatttttgtgaattttatatggttcattaccatataatctattatacctagcagttttcaaataatttggatttgaaaaagttttaaatacttctttaaaataaccaagttcaagaaaatccatattgcaggtaaggtaaccagaattaatctctaaaatgttatagaaccaatcaattaaatctgcattcggtgaatcggttgaagaatatcttctcatataatgattaaatgttaaaaccaatgacttcctttcatcttgaggtgaattaaaatgagaaatgatcttatcatagtactttttaaaatgaatagctaatttatgaagatttggattgagtaaacgtaactcaatttcagtaagtgaattcacatcttcatcaacattctcattattcataatatttctggtttccatttcatttctttcaacatcaagaataatttgtaattccctatcagtgattataggagatgtatttgatatagaattatcattagaatttccttgtccatcacattgcataattttcattggacgattcttaacattagaagatttggtttctttagctgtaggtgtaggtacagacgtaggtgtcattacaatgaatccatcatttcctacagctttatcaagtgtatgattattgattttaacctttttacgtttagcaattggtagtggtttatccgatttacttactttagaatttgaatttctcttagtaggtttcataacaacaaacccatcatcccctttaacttccctgaagttcaaattgttataaaccggcatataaataaataaattatctaactatctaactgtcttaacctatagacaataataataataataataaacctctatacacgctataaaattcctaataatttcgcgttgtccattttctctgctttttttctattaagcagcaactgatttgttttcattttattttattagttgtttgtgtgttgtttcttctttgctgtttttaaaatacttctcttttatcatactctctctctttaacaaccatgtcaagtgaaaagaaagagtctgtcgtaaatgaaactccaattgtttcatctcatcaaccttctcaattagctaaattagttaattctggtcctgtctcaattttatgttattgtgcttcctcaattttaatgacaacaactaataaatatgttgtctctggtcatcattttaacttgaatttcttccttttagcaattcaatcaattgtttgtataattgcaattgcaactttaaaatttttcggtgttataacttatagacaatttaatattaatgaagcgaaaaaatggtcaccaattgctttccttttagttttaatgatttatacttcatctaaagcattaaaatttttatcaattccaatttatacaatttttaaaaatttaacaattattttaattgcttatggtgaagttttatggtttggtggtgaagttacatcaatggcattatcttcatttattttaatggttttctcatcagttgttgcaacttatggtgatgttgattcaactactggtacatctaattttaatattggttatttttggatggcattaaattgtttctcttctgcttcatttgttcttttcatgagaaaaagaattaaattaactaattttaaagattttgatacaatgtattataataatttattatcaattccaattttattagttgcttcacttttattagaagattggtcaactgaaaatattaaccttaatttcccacctgaggcaagattaagtgtttggttagcaatgattatttcaggtgcaacttctgttggtatttcttattgttcaggttggtgtattagagttacatcttcaactacttattcaatggttggtgcattaaataaattaccaattgcattatcaggtttaatcttctttgatgctccaattaatttcttttcaatttcatcaattttcttaggtttctcagctggtttagtttatgttgttgcaaagcaaaagcaaaaggaacaacaagcaaaacaagaacaattaccaaaataaaagaggttaattttatagtactatatattctatttatcaatttttaaactataatcaacaattggtgtaccttgatgaatactacttgttgaataaatatcaatatcattacataaataatcaccaatattatcaattgttaatccaccactacattcaagtaaaaatttcttatcattttgatcattgtacatttcctttaaatttttagcaacaattggtaattcatttgattggaaattatctaacataattatatcaccacctgcattaattgcttcaattgcttcatttaaatttctaacttcaatttcaattttaattgaaaatcctccaactttccttgcattatttatagcatttgtaattgatcctgttgaccaaatatgattatcctttaacataatcatacttgataaatcaaatctatgcatatcacaacctccaactaacattgcatatttttccataattcttaatccaggtgttgtctttctagtacctgcaataatccccctatatccaacttctcttgccttagtaattatttcattacttttacttgcaatacctgataatcttgataataaattaagtgaaactctctcagcttgtaaaatattctttgatttaccagtaattgaaccaatacatttcttttcacccttagtaatttcaatatattcaccctctttatgatgccatttaatattaatttcacattgtttgaaaacttcttcaataaatggtataccacaaataattccacttgatttcatataaattgatgcattcttaatttcactaccaactacaaatcctccataatcaaatgatggaatatcctctgtaaggaaatcagttatggattgtttccattgtgtggatactggtaataaattactataatctgtcattgtccgtaaagaaagaacatgacatgacatgacattgacattgacattgaacgtccaatttcttgatttgttacgtaatatctatatctatctaatatacacttacatcactctcttcttcctctaatggtatcctataatcaattgattcatcagaatcactatctgcttcaattccaatacttatagataattccttattcattggtttattaactttactcttactacgacgtattgatttattagaatataataaactctctaaatcacgtacaatttctaaatcacattcatttattgcttctaagaaaatattatcaatattatctgtatcaatcattaatctattaccaaatcctaaattttctgaattatctatacttcccattatttccatatcaataaatttattagttaattcattaaataattctaagggtatattattttctttaatttgtaatgatgtaaataatttctttattgttgaattagtaaattgtggtggttttaatgatggttttattggttggatagtaaaggagttgtcaattgatggtatcggtactggatcaatatcaatatccatttcataatcactaatctcactgggtatgtcttcctctttgtcttcatcttcatcttcatcttcttcctcatcggaaactccataaatacctgatctatctcgtattattgcttcaggtaatgctaaattcgatgtatttgcagttttttcaaatgtagtatctatctcctcttcttcatattcatattcaggttcattatattcgggtatttgttgtgattgtgattgtgattgtgattgtgattgagttattggtaatgtatcatcaataaccatagatatttctgatgattcaatatcaatatcagatgataatttatcattaaaactacttgaataatttctagcaaatttacttacatctttattaacaaaacttggtatattagtgatgactttcggtgatacaattttaggtggtgaaactttaagtggtgaaatctttggtggtgaaataattttagtagtctctgtcttttttttatctatattaaataattgaccaagtaattttaaatcatcaattggattataaattttatttaaattattcctagttggtgttaataacaatctatttcttattggagttactgacatttccaatgctcttttagttaatggagttaaagatttccttggagttcttggagatcgaggggatcttggggtatgtggtgaatgtggagttgttggtcgttgtggtgattgtgatatcattggttgataagagattgttgtggttgaataccgtgtttttctattattgtgtagaaaaataaaaattattttttttttttaattcattgaaaaatgtttttaatctttttttactagatttcttttcttttctttttagtgtagacaaagatgactgttgcagaaaagaagaataaagttgaagatgttgaaggattagatgatggacttgctgttgattataaattaagtgatgatgaagaaggtgttgaaattgaagaagaggaggagtctccaaaagaaactactgaagatactactgcagatattactgaagatactacaatagttgttggtaaaaagagaaaaaacaaaagtgaagaaagtaaatcacaaaagaaacaaaagatggaatttgagaaagagaataagaaatctttaagtaatgaaaagaatgatataattgttgaaaagataagtagtaaaattcgtgaaattttcccaaatttatcaccattagaattaagtgattattatcttaagaaggagaatgttattgatacgagtgaatacaataaagaaaaaaatttaacaaatttaagtaattttattgaaacttttatgaaagaattaattccaagtattaaagaatataaaagattaagaaataagattaagaaatttgaaacgaagaagaaatttaataaaaaattcaacaagacagttgaaattccaccaagaaaatttatattaatattatcaatttcagcaattagatcatgtgatgttcatagagctacaagagatttagaaggtggatcagttaaattaattaataaaaatccaattggacaagatttaaaaatgttaaagacaacatggagtagaattttaaattcaacagttgaaagaattgataaaattttagagataagtaaaaatgatgttgaaagaaattttgaagatggattaacattaaaggaagaggaaattgatacaattattttagataattatattgattcaaaattacgtagtgttttagattattgtgaaacatttgaattaattaaaaaaattaaagataagaatcctaatttaaaagtttatgtatattaaataaataagtataagtatataaaggtaagtaactatttctttgcagctaattcccatttagcaacagtttccattgaataagcttcctttggattaattgtatttttttcagcttgtttataaaaaccataaagtattgcaaagaaacctgcaaatgctattataccattagcatgatgatttttaggagtatgaaaccaaccaccagttggaggtgtaacccatttaggaataaattgaggatgtgacatagttgttcttatggaaagatttctataggaatacaataccttttacattataataaattcatgttaacaaatttaatatgagatcccctcttctaattaccaatgagagaataagtaattgaaaaaattagaaatagtctcttcgacgcgacaggttgtttgttgtgttatagacgcgtcgagtgggcgattgctttgcgtcgatgcgtctatcttatttctcttagggatgtccatttttttttaattttcactttttttcactaagtgttggaatattatcatggaattttcattgaagttagtagtagaagtaatatcaaactaatagaggacatgcttgcatctaatcgttcttctatccatattgcaaagagatttatttcaatatctcctgcaatttctaaaataaatactattaataataatttaaataataattcagttaatcataaatttaaattctcttatgaaaatgcaaagaataaacaaattaatcaaaataatttatcattacctgaaaataaattagatttctcaaattataataataatagtagtagtagtagtatatcacttctttcaaatgatgaagcaaaattaataccttcaattgttgcattacatgcaagattaaatttaccaaaaaattatccttttaatacattagttaaatcattaacttgtccaactaatgaattttcaaatttatcctctaataatcaacaattatcaattttaggttctcatattttatcattttatatatcagaatatttaatgacaaattatccaagattaccaatttcaattttaaaatcggcaattgattcatatattggagatttttcattatatgatttagctaaaaataattggggtattgaagaagatttaacttcaaaattagataaatatttatcaaatgaaccagaaattttcaaatttggtaaattaagatatatacgtaaagtaacaaatcctgaaattaatgttactaaatattcaaatgatcaaaattcaaatacttttgaattatcaaaagctgaagcttatgcaaattctgtacgttcaataattgcaggtttatatattcattcaaataataatgatttaataataaaaaattttattaataatcatatattatcaagacaaattgatattgaatcattatttcaatttaaggaaagtggtaaattattatcaaaaattttaaaatcaaataatttacaacctccagtcgttaaattaatttcagaaactggtagattatcttcaactcctgtttatgttgttggttgctttagtggtgaaaatttattatcaactgctgaaggttgttcattaagagaagctagaattaaatcttttaataaagctttaaaagcttggtatttatataaacctttagatactaaattaccaagtgatgaaggatttaatggtatgtttgttgatcaaggtgaaaagttttattaatttaatttaatttaatttaattatcttttatacatttatacattttatattattactcttgtatataaataataaacagttatattataaacctataatatagaagaagtatttctattatccttatctattttcgctattatctactacaacatgttttattgtcacgacatttagaatttgttcatgaaaccacatgcaaatttattactcaaaggtatttcactgtctatagtactaattgacacttactctatctgataaatatgttatctagtgtaaaatagaggtaaaaaatgataaatattgattatattgcacaaatatgaataataatttaacaaattaagaaatattacaaagtttagtaacataattttatttaaaattacaaaatttactaaaaaataaaccattgacactacagacactattcatcatactcgtgattaattaactacatacatattctcttaaaatacattaaacacagttaatacaatacatgataaacctataagatatcattacgtaactataaacatggattatcaaaaaaattataaaatttttcactcaatttagtaacttttatcttatattaatcattgattcatcattaaccatcaacattatgttaagtaagatatttaaaagatcattacattatgatttagatatatccaataagttatcaaaatctatctatcatcccgttatagttgttggaggtggacatgcaggtattgaagcatcaacgggtagtgctagatgtggtattaaaactgctctaattacccctaaatgggataatattggcgcaactagttgtaatcctgcatttgggaggcatcggaaaaggtacattattaaaggaaattgatgcattagatggtattgttggtagaattgttgataaagcaggtattcaatttaaaattttaaataggtcaagaggtgcagcagtttgggggtatagagctcaaattgatagagatttatattcaatggaaatgcaaaaatttattaaaggttataaaaatttaaatataattgaggggaaaattgaagatttaattattgattatgatgaaaataatgatcaattaggtagaaatagaggtgtagtgaaaggtgttgtattaactaatggtacattaattagatgtgataaagttgttataactactgggacatttttagatggtgaaattcatattggtttaaaatcttggaaagcaggtagaattgatgaaatttcaagttttggattaagtaaaacttttaaaaaaattggatttttaatgggtagattgaaaactggtactccacctagaattagtggtaaatcaattaattataatttagttagtaaagaaataggtgataatccacctgaaccaatgagtttccttaatgaaagaccaaatattaaagatcaaatattatgttatggaacttatacaacaccaaaagttaaagaattaattatgaataatttagataaaactttccatataagggaaactgttaaaggtccaagatattgtccatcattagaggctaaaattacaagattttcagataaattacaacatagagtttggcttgaacctgaaagtttagatatggttaaaaatgatataatttatcctaatggtatatcaatgacaatgcctgaagatattcaatatgcgattttaaagaatattacaggtttagaaaatgttaaaatgttaaaacctgcatatggagttgaatatgattatattgatccaagggaattgaaaagtacattagagactaaattaatttcaggactttatttagctggacaaattaatggtacaactggatatgaggaagctgcaagtcaaggtataattgcaggtattaatgcaggattaagtgagagaggtaatggagaggaattaatattagatagaagtgatggatatattggagttttaattgatgatttaattactaagggagttgaggaaccttatagaatgtttacatcaagatctgaatttagagttagtgttagagcagataatgctgatttaagattaactgaaatgggtaagaaattaaattgtattagtgatgaaagatgggaaagttttagcaatgataaaaaaattatgaatgatggaatgaataaattaagagaatttaaattaagtagtagtaaatggaataatttattacctgatattaatattggtaatgattccaaattaaaatctgcatatgagatattaaggtataaaggatcatcaattaatgaattattgaaaattattgatgattctaaattaaatgatgaattaaatgatagaattaagatgaaaataacagttgaaggtaattatgaagggtatattaaaaaggagaaggaatatataaaggctttcaaggcagatgagaatatgaaattaccaaataattttgattataggaatataccatcattatcaagtgaagttataagtaaattaaatgagaatagacctgaaagtattgggcaagcacgtagaattcaaggtattacacctgctgcaatttttgaactttacagaataagtaaaaagggaggtttataaagaaagatttgtataaagtgtattattattattacttgtaaataatgaatcgtttttttggctaataatatgatataaagtgtgtatttaggttaaataaataaatattgagaaattacttattgtttaagtaacatttcatttcttttagcttcatctattctcttaaaagcttcatattgtgtagtaacagttgcaaaacctaattgattttgtctccattcattgaaagaatctcttatacctaaacctaaatttctatcagcttcccagagagcaaacattccaacaatggaagcagcagcaacgggttgtctgataaagaagaagagtaagactgccggtctataagtaactaagaatggcattgtattgtattgtttgtcctaaagaagagatatattatacttaaacaagagatacaagaggggaaataggtgataaattcatgaaggagggaaattttatgagggtgcacagattttgcaatttttttaatttttgccttttttcactgcttttcatgaaatgctcagcttgctcagcttgctcagctaggttttctcttcgaaaaggctttcttttaggcaaggatggacgttgagaggttgcatgagtgtttcctagggtctttacaggccgatcctaatattagaggtcaaagtgagactcaacttaaggctttcagtggggaaattggattttcaagtgcttgtttagatataatttcaaatggaaatgttcaaccaattgttaaaacttcatgttctatctatttgaaaaatataatattgagaaattggactgttggtaaacttatagatactgatgagagaccaattataagggaaagattattagttattataactaaattagataaaaatttaagaaatcagttattacctgcattatcattaattattaaatatgattatcctaaaaattggcctgaattattaaatcatattaatgatttaatttcaaataatttattagaaaatcaaatttcaattaataatttatatattggaatttattcatttactgaaatttgtagaaattttagatggagatcaaatcaagagagatcatcaactttagatccaattattaataattttttcccaattattcttaatattggtaatcaaattttaaataattatcaaaatttaatttcatcatttgaatgttcagaaattttaaaattaataattaaatgttataaatttgtcacttatttggatttcccattacaattacaatcaactcaattattagttgattggattactttccaagttaatgttattaatactaattttaatgaagattcattacctggttggattaaatcacaaaaatggtgttatcataatttatatagattatttcaaagatatggtacaaaatcactttcatcaaaatttgattattctgaatttagacatacttttaaagaaaatgttttaccaaatttaatcaatgtttatattgaaaatttgaaaaattggtcaaccgatggctccaatggtaatggtaaatatttatcaaattcaaatatttattatttaattgaatttttagaacaatgtttattaaaaaaagatacatttaaattaattgaaccacattttgaattaattattggtaatgtatcctttaaaattttcaatccaacagatgaagatttggaattatttgaagatgaaccagaggaatatattcataaaatatttgatattatggatgaaaatactggtgaagatgcattacattcattttttttcacattagttgaaaaaagagttgattatttagttccaatgtttcaatttgttataaataaatttaatgaattaaataatcaaactgagacaattgaaattgctaagggtaaggaaagtttaatgaaatttttatcaccaatttcatataaattatcacaagttaaaaatcctgtatataatgaagttgaaccatttttgaataattatataataccaaatttccaatcaaatttttcatttttaagggcaagaacatgtaatttaatttcaaaatttgattcacttgatttaaaaaattttgaaacaattaataatattttcaatggtataattaataattttttgaataatgaaaataatcatttaccaattgaaattcaaagtgcattatcaattcaaacatttattgttaatgaagaatttaaaaaattaatttcaggttatgttttaaaattaatggaaaaattaatgaatttatcaaataaatttgatagtgatatattaccaagtgttatgcaagaattagttgaatcattccctgaacaattagaaccatttgcagaacaattaatggaacaattaagtttaaaattaattacattattaaattcaattaatgaaattacaaataatgttaattcaaatgaagattatgattatgatgaatttgaaaatttaacaagtgataaaacttcaactgctttaggtattttaaatacaatgattacaattttattatattttgaaaattcaactgaaataattgataaattagaaatttattatagtaaagtaattaaaattatatttgataataaaattgaagatttttatgccgaggcaggtgaattaattgaaaatacattatttttaacaaggaaagtatcaccaattatgtggtcattattaaataattttattaatacattattaaatgatgaagatattacattatatttagaagattcattaccagcattgaaaaattatttaatttatggaggtgaaatttttcaaaataataatgaaattcaagaattattttttaaaattattttaacagttttccaaatgggtgataattctaatgaagaagatgaatttgatgatgatataattggatttagtgatattggtaatatttgtgatttaacaacaacatttatattatcattaaataattcaattagtggtaaatatttaccaattattatatcatatagtataagatatttgaaaaaaattgataataaattaaatgaaaaaggtataaattttaaaattcaattattaaatacaattatatcatcaattataattgatccaaatacaacaatgaaaaaattaattgaagataattcaattgaatatttcttaactaaatggtttaattttacaaataattttaaaagagttttcgatatgaaattatcaattttaggatatatttcaattttaagtattgatttaaattcattaaataatatgatgttaacaaatatattatcaacatgtggtaataatttatcaaatttattatttaaaataccaacagctattaaagaacttgaaaagagaagggaagaatatactgataagaattgggagaatgaattaacatataaaattaatgaagcaggagatgacgatgatgatggtgaaggtgatgaaggtaaagactttgatgatgaagaagatgatgaaggatttgaatattcatttgatgcaaataataaattttcatttgatgaaattgatgaattagttgatgatccatattctaataatagtttagataagattaatatatttgagcaatttaaatcatttattataaatattcaaacaaatgaaattgataaatataatttaacatttaatgaattaacaaattctgataaagaaacattaacaaatattttaaataatatatagaaatagaaaattttatgtatttaaataaataaataaaatataaaaattttatagaaagcactcataattttattacactaactaatggccaaatataatttttacaaccaattataattaggaaagcaattattaaaaataataaaaggcaaacacaattttcaaatttagttaaaagtgggaatactgaaccataatagaaaagtcctattaatgtatcaaaccatttttgttgaattggtttattcttgaatgaagttggtttaatgccgtgatgtatagttattttggtcatagtgggaggggagggggtatatatagaaattaaatgattgattgactgattgattgatttaagaataaacaattgttaatgtttacatcaccttaactgatctttatctttcatgttgtaaaaagaaaataaaccatatcacgtgccacacacaagggcttgtgttaaagtcacgtgagagagggttacgcgtaccttcccaattgggtattttctgtgacagtgaaaagttttacaaaattttcaaatttcctcactttgagataattactatattggtttacttacatgaatttttcataatagttgttatatcttagagattgaattattttggatattttaatttcctttctaatttatcaactgaccggatttatctgaggaagaagtatacataaacatgtctgatattgaagaacaaccagttattgtcgaagaagaagttgtcgttgaagaagaaacttcagttaccttagaagattgtattaaaaaagttttaagaactgctttagttcaagatggtttagcaagaggtttaagagaagcaactaaagctttaactagaggtgaagctcaattatgtgttctttgtgatgctgttactgaagaaggtatctcaactttagttgaagctttatgtaatggtgatgaaaaagttccattaattaaagtttctgatgctaaacaattaggtgaatgggcaggtttatgtcaagttgatagagaaggtaatgctagaaaagttgtcggtgcttcttgtgtcgttgtcactaaatggggtgcggatactgaagaaagaaacattcttttagaatctttacaaggttaaataatgtatctacatgtatattaatttatatattataagtttaattaataatcttaatctttatcaaaaattcatacatttaatttaatattatattatatacacttatacgcaatactaactctctaattccatttcaaattcttcactttgttgattagattgagtagtttgattattatcaacattaataacctcttctacttctgcctttatttcagcatctaattcattactaatttcaatctcttcttcttcatcttcaaaatcaacattgaaaaaatcagaatcatcaccaacaatctctttataaattttctttgcctcttcaactataccatcatatgataattcacttgatggcatattaacaattataatattattatcagttttcaatatttctttattatatccattaatattttcaggatttaattgatcaatatttgttaattgtgtaaaacttaatttcattaaataattaatacgttcatttgaaaatttaaatttaaaatcaagtaaacttttacttaatttcattgatccactctctgttaaaattggtttattattattataataatttaaatcatcatcattaaattcattaaaattaaatgtactctctctaatataattttcctctaattttaataatgctgaatttaaatcattaattgcaatatcattaattgttggtgcaattgtatgtaaataccaaattgatctacctttaggacaacaaccagtttcactacccattattaaacattgtacaggatattcattttgtgaatttaatgaatttggtgggaaaattataattgatgatgattcaccattttgaaaccattcattacatgatttatcaacaattgcaataattcttgaaatttcataaaatttacaattttcaggtttattaattgattgatttaaacttgaaataattctttcattaattttaatatttgatccatcattaagtattgcagttttattttcaaaatcataagattttaatttagtatttaatttgtaaattgtacctgcaacagctgctgatctacaaaatccttgagaaatttcacctggtccaccaaattttgaatataatgttgggaaattaccataaatattaaatgataaaatatatctcttaattttatttaatgcatcaattaattgaattttaggattattaattaatcctaaggtgaaaataatttcattaattaatttatcatcaagtttaaaattttttttcagaaaattttgaatacttatatcctttggtaaattatcaggtaattcaataactggagatgaaataaattttaaaaatttcattaatttacgtttagaatttaaatcaatttcatttgatgtgaaaatatcttccttatttgcatttaatttacctaaattattattttcaaaagtatgaaaatttgataaactttgaaattctaaataatgataaactcttgatttaattaataaatctaataatgaagaacgtgggaataatattttaggtgataaatcaataccataatcttttgatacaatattaaaatcattatcattaatatataaatgaatatttttataatttttaaaacctgttttattaaattttgaaccaataaaccaatttttaatttgttcaattgttaaagttgctgaatcatctccataataaggatttgaatcaatatgtaaaacagatgtaccttgccaagataatgcagctgctaatattgaattaattaaacctgtaccacaaattaaaacatcaacattcatattctccggtaaattcggagtattaggtttttcaatcccttctaattgaggtataatggaaggacgtcttgaagataatgcagatgaaggtcttctttcaacaatagatggacgacgatcagacatcattagctgtattatatgatatagtataggatgtactttaaagaaagaaaattgtatcgtccaatggaagattttagataataaataacaatgaaaatgaaaattttcactttttccacttatcactattaaggaaggtgtataagcttgtatatatactctttttatacaatgagagttgttattcaaagagttaagagtgcctctgtgacagtagacaatgctgtagtgtctagtattggtaaaggattatgtttacttgttggtattacacaggaagatacaatttcagatgttagtaaattagctaataaaatacttaaattaagattatttgaagatattgatcaatcagctggtacatcaactgaatgggttggtaaaccatggatgaaatcaattattgatattaaaggtgaaatattatcagtttcacaatttacactttatgcaactattaagaaaggtacaaaacctgatttccataaagcacagaaaggtcatttagctaatgaattatatgaagctttcttaaaagaattaagggatggattaagtgttgaaagtgttaaagatggtgtatttggtgcaatgatggatgttggaattgttaatgatggtccagttactatcgtttatgacactaaagaatagaagaagtatatataatatattattatagaatatagacgttaaattactttcgtttgaatagtttaaaaggtgataaagatcgtatactttcattagatgataccggtgataatagattattaagattcccacctcttaggaatcttgaagttctctttgttggtaaatctaatggtgttgaagttatagcatatgttaatgattgaatagttggaaatgtctttaagttattattattattattattatccttattctctctcatttctaaatcattaacgataacaactcctactttacatttatcaatcatttccttgttatattctccattacctataactaccattgtaacttcataatcattaattgctctattaattgcataataaactgcaccaacacgtctctcatatactatttcaacacatttatcaccaattaaggatttcatagattcaaataagttctctttatctttattatcattaaatccagtccttaaataattatgtaatggtataacctctataacaaccaatatatcattatcatttaaaattgaattaattgtccatttaacaacgtccagcgtgtcatttggtttatatgcaaccattatagttcttgaattacttgaattaatgtatcccttgttcttaaatactttggtaattaaacattctgcataatccccggtactcacatcaaatgatatactactactactatttggtggtgtaagttcttcttcaatagttttatcatcttcactatcactaatgtattgccatagatgtgcattctctatagtattacccaacgtttcatcatccagttccgggtctattcgtagcacactcattgtcagaagaagtaaaagaagtaaaggaagtggaaatagataaagatttgtaatatataagattaacttttttttcatgcaagtgactaatcgaaggttttaacaacattatattatatgattgttcttcctttaatatgtgtcgtttcttgatatacaagggtaaggaaccaataactctatctcatctgcttactagacctcaacattctattattaatcaatcatatgattcaagattaagaattgatgcacaaccagttaatggtgatggatttggtgttggttattatattgatgatgatcattcaagtccatgtctttataaggcaattacacctgcttggaataatcaaaatttacaaagaattagtgaaaagacaagttcaaaattaatatttgcacatgttagagcttcaacttatggtgttttaagtgaaacaaattgtcatcctttcacttttaataatttaatgtttatgcataatggtggtatatcaaatttcccaaaaattaaacgtacattaattaattttattgatgaagatttatttattaatattaatggatcaacagattcagaatgttgctttgcattatttttacattgtcttagattaaatggatttgaaccaaatagtggagaaattgttaatattcatattttaaggaaagcacttactgatagtattcaatatattaaaaattgggttaaagaagttagtaatggtgatagtaataataatgatccatcattattaaattttgcagtaactgatggtgttaatatagttgtttcaagatatgttaattctaaaactgatgaagctgcatcattatatttttcaactggatcaaattttgttgaatattcaccaggtcgttataaaatggaaagaatgaataaatcacaaaatttagtaatgattgcaagtgaaccattaacatttgaaagaaatgattggatttcagttccaactaatagtacagtttcaatttcaaatttaaatattttactgcatccaattgaggatgaatattattcaactaatacaattagatcaaatgaatttgcaagttcaaagggtatgttaggtagttatccaacttcaaaagatttatttaatgctgtacctccattagagagagaaggtagaagtagtattattgcatgatattatcttatttatcctactctatattctatttacaaatttatattatattataccttttatacattaatcatcgtaaagcttggaagacctatacgaacatttcgtttcactcaagacaaggttctttattgatcataatcattctttggtggagcaccattttcacttctcatatacatatcaattgcagttgagaaagctgcaaaacctgcacaaccaactaaaactgcttcaggtccacttttcaatgctaatccaccaccagttatacaacctgcagctgcaccattatataaatcacttttacctcttaaaccttcaatacaacattcaacacctgaaaatattaaaccaatataaccaaaattacgtgcacttgatttagttctattccaaacatctttaaattgaattttcatttgttcctttaatggtaattctaaatatttttcttgagctaaagctgcagctccacccatttgtccaatacctaatggtgtatcatatgacattgatgccatgaaaaatccgaaaacacctccaagaacgaaacctgaaccacctgctaatattgccttacctggacatgatgatataaaattcataatttcctttgcacctgcttcaccttgttcctctggtgtcatctcatttaatggtttagaaggtggtggtaggaatggattctgcatatttgtcactgtcttaaaaggaagattatagtatgtattatttactaagtgaaaaattatttctcaaatttacttactaaattgctttattttactatacctctttaacttaaggacaattactatatctttaatgaattgatagaacatttacataacgagtaatgtaaatggtataagtgccatattttattaataccttatactaggtttattatctaagtataagattacgcacaaggcattaataaaccttattgtaaaaccaatcgacgtatagttgttctgcaaggattcaactaattgcttcttcttaatacaaccaaacaactacaatgacattaagtagaacatcaatggatcaatcactactaagtcaattatattacttcatattcagttatattccaattattctatatgcaaattttaatattaattccaatttatcatattattcattaatgttttggtggtcagtatttataattggtttaaataatgacggtttagtggattatttaaagataatttatagtatgaactatgattggactgatatttttaaattaactgtaagtaatttaattactttaaccgttggttggagatttacacctaataatcataaattgaagaattttttagtaatattactgttttgtattatggtttacactattaatcatttcgataaatttataaattatttcagttcatcataaaattgtttgtttatagacaagatatatattatattagttaattaattatttatatttacaattagttctttggttcatcagattttgatgaatcttcagatgattgttgatttttgtacattttttcaaataattttaaacttgattgttgtaattcttcatatttacccttaatttctgaaacttcaacattttcaccaccattaactttaacaattaaatctcttaattcagtaattaattttttaacattttctgcatctgctttatctaatttatcaccaaattcagttaatgatttttcagtatcattacataattgatctgctttattagtttgttcaattgcttcctttctagcttgatcttgttctttgaatttttctgcatcattaaccatcttttcaatttcactatcagttaaacctgatgaacctgcaacagtaattgatgaatctttaccagaagctttatccttagcagaaacattaataataccatctgcatcaatatcaaatgtaacttcaatttgtggaacaccctttggagctggtggaatacctgctaatgtgaaattaccaattaatttattatctctaactaattctctttcaccttggaagactctaatttcaacagaagtttgaccatctgcagcagttgagaagacttgtgatttcttagttggaatagttgtatttcttggaattaatctagtgaaaacaccacctaaagtttcaatacctaaagataatggagtaacatctaataataaaacatctttaacttcacctgataaaacagcaccttgaattgcagcaccaattgcaactgcttcatctgggttaacagctttagatggttctttaccgaaaatttctttaacagtttcaataacttttggcattcttgacataccaccaacaaggataacttcaccaatatctgaagttgataaattagcatccttaagagctttcttacatggttcataagttttcttaattaaaggttcaactaatttttctaattgagctctagtcatctttaaattaatatgttttggaccagttgcatctgcagtaatgaaaggtaatgagatttcagtcgataaagctgaagataattcaatcttagccttttctgaagcttctctaattctttgaattgccattctatcattttgtaaatcaatatttgattcttttttaaattcatcaacaatatatctaacaagagagatatcgaaatcttcaccacctaaatgagtatcaccattagttgatttaacttcaaagacaccattatcaatatctaagatggaaatatcgaaagtaccaccacctaaatcaaagacagcgacaactttagaatcatctttttctaaaccataagctaaagcagcagcagttggttcattaacaactctagcaacgtttaaaccgacaatagcacctgcatctttagttgcttgtctttgagaatcattgaaataagctggaacagtaacaacagctgaagtaacttttttacccaggtaagcttcagcagtttctttcattttattaagaacgaaaccaccaacttgagcaggagaatatttttcacctcttgcttcaacccaagcatcaccatttgaatgtttaacgattttataaggaacttgtttaatatctctttgaacttcagcatcttcaaatcttctaccaattaatctctttgttgcgaaaagggtattttctggattaacaactgcttgtctcttagctggaataccaactaatctttcaccatctttagtgaatgcaacaactgaaggagtagttcttgaaccttcagcattttcaataattttaggagttttaccttccataactgcaacagcagaattggtggtacctaaatcgataccaataactgtaccttgaaccttgttggagttatatctaacaaagttagaagggattttagtagcagcgttctttgaaacagatgaaagcattatcaaaagagtgggttgtctaaaagaaagagcaacaggaaacaaaatgaaaatgaaaaatggacgaagttggtcatttataagaaaaagagggaaaaagaggaaattttcactcaaagtgcgaaatcggtattaaatactttattttattttattcgagaatattctattaagtatccttatagtatacatactacacccatttctactgaatacatctctttaactactttctcaacaactgcaacatctatattaccatctctactatcactaaccatctgtacaagtcttttaacacttatatgactagtaccttgtggtaattctcttactacatctctcactataccccttatctcactctccttaattatacctttcctatacactgcctctgctctaatcttatcctctccagtctcctttctcttagcttccttggccttaagtctctctaatactgtagacataagtctctaattagttatacaaactacttaataaactacataattgtaatcttgtacttacaccatcaattattttcaattgacattcaccaatcttacgtaacactgttaaaactgtttcattatcaacttcttgtaatgttttactaactctaaaacatatattaattatatcaatacatgaatgtcctctttcaattagggaatctaatataactatagattcatcaattgatcctcgtaatgccattttaatcattttattaattataataggatttggtgtatcaactaatttaaaaacattttcattattaatcattttaaatccataataaacactttgtaaattattaataccttgtctcatatctccatcacttgtgaaaactaatgcagctaatccatcatcagtgaaagtattaatattttcattatctaaaattcttttcaaaatttttaaaatttcttcatcacctaatttattaaatcttaaaattgaacatctactctgtaatggttcaataattttattactttgattacatgcaaatataaatcttgtactacttgaataaatttccattgttcttcttaatgcttgttgtgcactactggtaattgaatctgcttcatcaagtataattatcttttgtctattatatggtaatgtaactttcttttgtgcaaatgttttaattaaattacgtacaatatcaatacctctatcatcacttgcatttaattctaaaactgcttctttaattaatttttcatcattatttaataattctcttgataatgctaatgctgcagtagttttaccaatacctggtaatccactaataattaaatgtggtaaattaccatcttttgcaatattctttaatgcattaatagtttccttattaccaactatatcattaagtgtataaggtctatatttctctacccatggtagttctaaattaagtggataagtcattacaaaaagaaagtgttaattataaggtatatacataatactcgctattttttacgtcttttaactaatgaagttaaatcattactttcaacaactcttttagccatttctttcattttttccttctccttttcttcaatagttaatctattacttaactcatctaatcgtacctccatttcaccttttcttttccattctttaccaagggaaatacattctttcatagattttattgcattctctaattcaccatttaattcttgtgaaattgataacataactaatgtctctgcaagtttaatatcatccttttcatcacgtaatatattaactgcttcttgataacttttcattgattcaattccttgatctgtctctaaataaatatctccctgtaatacataaacattagctatttgtattttattatcatgtttaataaattgttcctttgcaacttctaatatctccattgcaatttcaaaatcattaggtccgtcatctatttcagcttcttccttaacttcttcttccttaacttcttcttcctctacttcttcaacttcaccatctttctctgcaactccattgaaaaattgaaatttaccctcctcttcttcttcctcaccttcttcctcatccccctctcccccttcttcacccgtctctccagcaataacatcattattcttaataccattctctattaatgcttttgcatacataactaataattcaccactatcatcaccattctctaaattataaacttgacatgcttcactatacgcatcgactgcattttcccattgtttcttggccatacattctgccccttcctctactaacttcctaacactatctgatggtgtgtacattgtccgtgtataagagattatacctctattatatacctctattaatacaacgcgtctctttaatgtaatatattaattttattttccaattttattttattacgaaatgggcaattttcctcagactgtgtttacattggattctttgccactttttcctttttgattttgatcttgatcttgatctgttattggttctttaagacaacaggaatagtaacaatggctgaattactcccttctaatgatcatactactcaaatcattaaacgtaaattaaatggttatgtaggatttgctaatttaccaaaacaatggcataggaaatcaattagaaaaggttttaattttaatttaatgattgttggtgagaaaggtttaggtaaatcaactttaattaatacattatttaataaagatttatttgatttaacaactattaaacctttagaagatttaaataaaattcaaattgaaactataaattcaattattgaagaaaataatgttaaattaaatttacaaattattaattgtaaaggatttggtgaatttattaataattcaaattcttttcaaccaattattgatgaaattgattcaagatttgattcttatttagattatgaaactaaaattaatagaaataatttatcaaatgattttattgatgaaagaattcatgctttattatattttattgaaccaacaggtcattcattaaaatctttagatattaattttatgaaatcaattcatgaaaaagttaatttaattccaattattgcaaaatctgatatacttaatgaaactgaagttgaaaattttaaattaaaaattaaaaatgatttaaaaaatcaaaatattaatatttttaatccaattaaatatgaaaatgatgataataataataataatattgaagatgatgaaaatttaaatattttaaataaaatgccatttgcaattgttggttcaaataatttaattaaattagatgatggtagatttgttagaggtagagaatatccttggggtaaaattgaaattgataatgaattacataatgattttattaaattaagacaattattaattagaaattatatggaagatttaaaagatttaacatcaaataaattatatgaaaattatagattaaataaattaactaaaatgggtataattcaaaatgattcagttttcaaagaatttgatccaattcttaaacaagaggaagaaaaaaaattacatgaattaaaattagttaatttagagaatcaaatgaaacaaatttttcaacaaaaagttaatagagaagagaaaaaattacaagaaactgaagctgatttatttagtaaacataaagaaatgagggataaattattaaaacaaattaaaatgttagaagataaaaagaaagaattagaatcaaataataaattaattgatcaaaatggttcaactggtgttagtcatactcaacaacaacaacaacaatcttcaatgttactaaattctcaacaacaacaacaacaacaacaaccaactaagacaagaaaaggtttcttacgtggttagttgtgtatgagtaacttttctttttctttttcttaatcattattaatattaatattattatcattatcattatataatccctaagtagatattaaaatagctagataccatttgcaaaaagaaatgaaatgaaatgaaaatttcataattcttctttggtgtcccaaaagggtaatattaacattatttctataaaagaaacagtaattccaccatttaatatatttccaatagtaatgtacttggactatcaaggatgaagttatcaacattaataccaatcagtggattaattacatctattttagcaaatgttattaccacaacattaacaaatacacttgaagaaagatcatatgcaattgttgaacaagaaacttttattaatacagttttactagatgcattacaagagaataataaatatcaaagtgtaatgcaaagtaaaggaattgaattcccacctgaattaatgcaattttatattcaattaaatacttatgaagttgataattttgcaactagtttatttattcaaagtttcccatttgatcaatttgcaacatttattacaaattttgattggttaagtacttatatgaatgaattaagtatgactgaatttaaagttccaagtgattatcatgttatgacaataactaataatgatttaattgcttcatcacaagttgtttcaacaagtagaatttcttcaataccttcatcaactgcgtcaatctcaactcattcatcatcaactatatcatctgctaccacttcatcatcttcatctaatattgtttcttcaattagttctacatcacaagcaaatggtaatataattacaccttatgtccctcatgctattttcttaacaattatggcattattggcttaataatttatcaatcctatccatctataataaaaatgttagtatatattatattgtataacagagtctgtatattccatacttacaagtaatttaaattcattagttgataatttatcattaattaattttaataattcattatcatccttatactttacttcaataccaatatttttccaaaatgtacaccattcattaatatcatttggattggaaagagttatttgtaatttaccttgtgcatgtttaattaaaatatcatttcctctgatatatattttaattatgttagaaatcatattggttcctaaatataggttttgaccagtttgatggattgttaatggtaatgagagttcattccatccattgggagtttgaatagtggctctctgaactgttgttactggcattgatgaaagaaggtgtgtggatataaagagatgagccttattatgttgatataaaaatttgactttttttttggtcagtaacttactttgactttcttttgtctgtttcttttattatttgttctttatgtttattctattatagtatacttattgtacatgtggtagagtatcatatatagtctgagtatataagacatgatatacgtataatctgctatgttcttacgtaatctcctgcttgttgttatctaatatactatatatcagtaatccacagttttatttatttaattaaggttgtttatagttgattaataataatatcttactttaattatctttcatttatcaaacaatgatatcacacgatgaaacccctcatggacgtcatcttggtgtaactgatgttataatgatggtagttcaaagaattattggatcaggtatatttgcaacacctgcaatgatttatagagatgttggtggttcaccatttttattctttttagtttggttaattgcaggttattcaagttatgcaggtataatgtgtttctctgaattaggttcaattataccacgttctggtggtttaaaagtttttctttcaattatttataataaaccttttatgttaattaatgttgttttcggtattttcattgttatatttggttcaattattgcaaatgttatcatatttggtgaatatttcctttatgctgtagggattgatgatggtccagttatggaaagttatagtaaaccaattggatttgcatttctattcttaactattttacttttattatgttcaacaaaatttgttattaaagttcaaacagttacaggatttttgaaaattattttacttttatgtgtttcattaatgggattatctgttttaattttaccttcatcaattactaaaattgataataatttacatttaaaagattttttcaatgttaaaacaaatgttacaattgcttcctttacttcagcaattttaaaaggtattttctcatttaatggttggcatacaactcataatgttttaggtgaaattaaagatccaattaatacaatgaaaattgctgctcctttatcaattttattaattaatatttgctatttattaattaatttaacttatttaattgttataccatcagatgaattattagaaattaatgaaatggttggtttagttttatttgaaaaatttttcggtaattcatttggtaaaattattttatcatcattaattgcattctcagttggtggtaatattataacagttttatatcatatttcaagaatgaatcaagaaatttttagagaaggttttatgccatttagtaaattctttgcatcaaattatccatttaattcaccattaacttcaatgttaattccattctttattacttcaatatttttaattataccttcaaattcaaatattttcaattatgcaattaatttagagagttatccaacacaaattttctttggtttagcttgtttcggtattttaattttacgtaaaagaaatccagaaaatgatcatcatattaaggcatcatatttagatatttcattcatgattttattctcaattttcatgttcttaggtccgttaattcaatcatctaaagatagtgatagtgatagttcattaccaaattatgcaattacttcattattaattttatttttatgcatgttatactggttattcatgtttaaattattaccttggtttttcaattattcattaaaacaagaaacaattacacttcatgatggtatgactgttcatcaatgggagaaatctccaaacgaaaccaattcagcttatgaaccattggtgtaaacgtagaaactctatctatttagctatttaaacacctttttgtgaaattttgtattatgtaaggaaatctttgtaaaatgatttactgtggagtatatatttttatttaatattaatattgatctataatttctttctttaagcttaatataaagcaatggctagactatatgaagtattaggtgttgaagtatcggcaactgaaggtgaaattagaaaagcttataggaaattggcacttaaatatcatcctgataaagtatcacctgaattaagagatgaaagtgaaattaaatttaaagaaattactgaagcttatgaaattttatcagatgaacataaacgtaatgaatatgatttaggtggaggaccaaataataatagaaatggtaatccattcgatgattttgattttgattttgaatttagtaatggtggaggacatggtgcaaatttctttgatgaaggcgattttgcacaatttttcacaggtaatggtggaaatggtaataggaaaacaaataatcatagagattttaatcaacgtcaaacaagtaaagatttagatattacttttgatattgatgttacattatctgatctttattttggtaaattaattaagaaaacttataaaaggaaaattatttgtgttaaatgtaaaggtaatggattaaggaaaaatgcagttaaaataacttgtccaatttgtaatggtcaaggtatcacacaagaatatcgtcgaatgggtggtatgacatttgctcaaagagttgaatgtaatcaatgtgaaggtttaggtatttattcaagacctgatgataaatgtaggaaatgtaaaggtaatttagttattgatgatgaaaatattgttgaatttaaaattgaaaaaggttcaccaaatattggtacggttgaaatgagtagtatgggtaatgaatatccaaatattaaaactggtaaggcaattttaaattttaaatttattcaagatgatgaattaaataataattcaatgtttttcagagatggtgataatttatttacgaaaatttcaattaatttagttgatgcattatgtggatttgaaaataatcgtttaattaaaacaattgataatagatggttaaatattaaaattccaatgggtaaagttttaaaacctggtgattcaattattattaaaggtgaaggtatgccaattccaaattcttacctttcatctcatggtgatttatatgttggtgttgaaattattttcccaaaggataattggatgttagagagaaatgataaaaatagattaattgatgtattaggtcatgttaatagtaaagaaaatgaaagtaaaagtaaagatgcttcaaataatgcagatgatgataatgatgatgatagtcaaccaacagtatttcaaataaaggataaaaatagtgttcctaaaactttcaatacttatatcaataatactgatgttaaaaattttggaactgattcaaaatcaaaatggtttggttggtttggatggtgatacacttgtacatatagaagcatagaatagaaaatagaatatatttaaaaacaaagctaatgattattttacatactagaatatatagttttatagataggtctatagatttaaattatatagttgatttatcttgatagaattttaaaatttggtgaatatctttatctttatcattaccatcttcttcaccatcctcttcctcttcttcaatatcagaaaactctaatttcagtgcattatcaaaatctaatactggttcaaaattactagattgtatactatttaaaatatcttcttttttatcttcttctttgaactttaaatcaagtggatctttaaaagttgaacttattgaacttgctgaattatctttactccatagatttcctaaaacattattcatactttgatattctccatctaatacagcatcggggatagaatcatcatatattccatttttattatgtggtatatgctcaatttcaaattcatcatcttgtattttaccaatttcaacttcaggttctggttctaaaacctcatgatgtttagacattattaaactttccagatcaaccagtttataaggttttgatttctcagtatctttataatcaaatgtagtttctccaatatcatcgttatcagttgaggaagataataatgtatgtatattaactttatgagttctttgataaacaggagaatttctatctgttgataatttcttcatcattgtaatatcatcattatcatcagtaaatgtaacttcctccagtctactgatatcgatactactatcattgaaactatcattatttttatccttcccatcaattgcagtatcaaaatcattggtagttttattatttattccaaattgcttttgatcattaaatttagatgatttgaaaaatgctgccatatcattatcagcacccagtgttaatttagatttaattcttggtttcagtgaattattgaatgatgatccaaatgatgatccaaaagctgatgatgatcttgagagagtattacgtttattgaaagtaccattattttcattattatgattaatttccatatgtgaatgtgacctttgcaatgttgtagtatcatgatatgcaacattttccttttcattttcattaaagtctatacttccaaagatagaaattggttgtttattgatttttcttgatttattagcattctctgattcagggaataatggtttggtgtttaatggtatactgtgtttaggaattgaattgatattttgattattactgtgattatgattgttatttactttcaatccatttgttgatttagaacgtaagattggtctaccaaatccaaatgattcaactgtttctttctttgaaacatcagtttttaaatctttattactattaagattgtttttattaaatctaagagcattttccttgtcttttgcagcattcaaatgagctaacctgctacgatgaatctgtttattatctgacatgttaattgcaacaactagcactgaactgagtctgaaaccacaaatgaaaaggtagaatataatctcaaaagaaaaagaagaagaagaagtttaattaaaggtaaacaaataattaatttcccttttgagaatttcatgtcaatatggaaattttgaaatttttgaaaaattcgtcatattttagtagtttgaacatcttttcactggcaattatagtgacctgtcacaatgaatttggctcggaaattgaagaatatccctttggatgagtacaccactgattgccttgaaaaagtgttggtaaattccaaggaaagtaagcaaaaaaataggataattcatttaatccagtcagataacacctttaaacaacaaaatacaaataaactattggaattgctaaactatacacatattgaatcacctaagttagaaacagtatatccatctgttgttacgaactttttaaactacaaattacgaaataaaaaggagaaagttgattttgttgcgagttatggtaacttgctatcattatcacatactataacatttttaaataagcaaaatgcaactgatatggttgatcgatataataagttatggaaacacacacagattgaatatttttctcaacagaaaccatatgatcaagttcaaatggaatccactccaatgaataaaatcttacaattgaatttcaattgtgaaactccgtatgcttcaaatgtccaacatatagcaactacagaagagttgaagaaactgatacatttaagacaacaatataattccaaattgaatttgaaattgggaccaccattactgaaacttgaactagatgctgatagatttggaggaccaattgcaccatgtcgtgtttttaacaagagattgaatagacttataaaactacagcaattttatttgaaaactcgtccagtgtctaaagaaactatgaaagttttcaatgctatggatttagcgggaatggatggattaatgagagaggcatattgtacattcgtggacaatatcttctatattgataatgattgcgagttgaataaatcagacattgacttacatagaaagcaaatgtcggaagaaataaaaaatttatatgatttagcaaagatttaaatatcatttatgaatatatggttataaaaaggtttgcagccatagatacctctttctttcagaatctaatacacagaatgattttcctgttttattaactgctaaataccctgatttaaaattcatcatttcttcactattggtgattttttccaaattataggtacatgctattgttagagatttatcgctgtatgatgtttggtaaaaaatggcaacattttcgtacaatatggaaaacatatcggcactaaccatttcaatatctataatttcaaagacagtgttgatcttgaactcaaaataagttacatgcaaagtttccaaatcaaatctatgcataataatatgtgaattcttagttgtatataaaaacccatgagtatcaaatattttaaatttatattctttgttaacatctggttgatttgttaaaataatacttttctccataattatctcttcctttacatctcttttgattttttcgaagaggttatccaatttaatattcaaaacattggtaaatttattaattttagaataatcattatcgccatcgtggatgtcaatttgtgtatcatcatttttactctcaatcgagtttaacttactactaatgaaaatcaaaaatttagtaatatcattagtcttaaacgttatattgactttctcatctgttgttatctcagataatatatttgataaccatataattgtttgttcaaaatgttgttcattttctttcaactcgatcataaattgatatgcgtatttcataaaagtttgacatattttaatacattcatctatttgatctgtatattcaaaatttctatttatatcatactgtgttaaacctttcaaatcagttaaatatatgaagaaatggtgtagtgatgaaataatatgattatagattgtaattcttgcattattgaaataagtacttcctaattgtgaccatcttttaatacctctatcacttaaataatcagttaaccatttcttggttgcattagacaacgaccctgttaaaagtaaatcatataagtcataaattggatcggtattattactttcaaatttaatattattttcatcagaaatattattctcttcatcttcagcaatttcacctcttaatagttcaataattctaatagtataatccatgtacaatttgtacttattatctaatttctttgttgctctttttaagtacaacatcacattcaatagttttgaagaaatcattaataccttgttcattattttatcattataaataaattgtgtacttaacttggaaacactaaaaccggcttcactttcagctagcacatattggtatgtcaatgatttgttgggtataatttcaatgatttttgagttgttgaagttgttattgatacagatatcatcgatgacaaaaatgttaccaaaaatgtaagttaaacttccatcatttgaacctgcaagtataacatttaaacttttatcatctttatcatcctcttcatcatgtggataatcatcatcttcatcatcaataaatttcaatcctgtgtttatattggtatgagtattactatcaggattctttttatttgacatgcctttcacatttcctatgctagatctcaatgctggcattgagcctataatatcaattgtatctattattccatcaacacctttcgatttagctttagtatggcttattttacattcattccatgtcaaacatgatatttctgtattcaatttcaattttcttattagattaccttgcattgcattgaataaatatagattcccattatttgatgcgatggcaattcgtttaccatcaggtttccaaacaagattgatcagcttttgttgagttccgttaatttcttcatcatctgttttcagtgaattaatatctatatcccatactttttcgtttccttgacgataaatccaaataactgtatcattcaattgaaatgataataaatccatctgaggacaaattgtaaaacatgatgagtttgataattgatgtggaagttttgccgtacccaagctcattcttctttcaattacggttttttctatgttattaatggtacttctatggatacttttgaaagaactatacataaaataaacatggaatatcaagatctggaaattacgccaaaatttccatcatgaaatttatcatgcattttcctgtctttatttctttctttctgattttttcgttatttgataatatactcaaatattgcataaaaatatacacagtaatgttcagaaaaactatagaagttaagccaagtgcaaatttgaaatcttctgaaagaaggaagttaaaaaatgacattgaaacacagatgaaaggtttcagagttcctgaaaagatgtcaaaggcagtatttaacactccagaaatcaagaaaggtatgatttattacgatgcaacaactaaggacccaattttctgtcaactcagagatggtaatgatttcattccaactctacaaggactgtatttatcaatcaacacgtctgatgataattttgtgtgtattccaactatcatgacacatgatgcagttattgatagattaatgaatggtgcaaatttaatgatacgtggttgtattggaccttttggtgctggtttgaaaaatggtgctattgttgctgttgtgaattaccttaaaccaaatatacctattgctgttggtgaatgtttaatggacttagaaggtaaaactaatgatactgcaccttcctccggtgttgctgtgaatattttcacatacccaggtgataaacttaaccagcttggtagaaatctaactgatatattagaggatgcaaaggtttatacggagaaagagcaatccgaattgaaaaaggtagaagaagagtctaaaggcgaatctacagaaactggtaaagtagacgaaacatcagaaacggttgttgaggataaagttgatgattcaaataccaagagtgcaggtgataatgaagttgtgcccaaaatggagaatcttgaaattaaagaaactgagaatgaagaagaatcagatgaatacgtcatgagtacggaagatattgatgaaatgtttaaaagatctgttttatacacattaagtcaggatacaattcaatttccaattactgcaacgcaatttatttcaggtcatatcttgaaaaatcttccacctgttgatactaatattgtcaatatgaagaaaacttcatggaagaaaactgcaaagtttttaaaggctatggaaaaggataatttattaaaactaaaaggtaaagatgataaaatggttattgtatccgttttaccacgttcagatccaagagttgccgaatttgttccatatagaatcaagaaatctgcaaataatgataataaatccggtgtttcaaccccaatatctgatgatagtgtttcaatgcaaccagaaccgccattaattttgaaaaattatctaaagcctaaaaatgctgctagaatgttattcaacaaaattgacaaagaatatgattcttattacacagaaaaggaaattaaacagtttgttcaattatatatcaaacaaaacccacaaatagtttcaaagaaggatccacaaagtattgaacctgatgacattttaagagagtttaatattaaaacagccattaagagagccgatttagcagatcgtgtggtttcaacttgttctccataccatatgttatatagagaaggtgatgaaaatagtaatgacattttaaagaagaagagattctcatacaataaaggtaaagttccatcaattaatattgatgttgaaaatgttagatctcgtaggaaatacgttacacgtatcagtggtgttgaaaagttttatgttgatgttgaaaaattagctgatatcttgaaagtccaatgtagtagttcaagtacaattacagaagctaaagatcctaaagatggtaggattgttaatattcagggtagtcaagactctgaggttatcaaggttttaaacaagtattggggaatacctgtgagtgtatttgtggttaagaatggtaaatctaaacgtaaataaaatgcatttataagattgtaactcacttttataagttctacagcgtagtttaaaaaaattcaaatacattttaagcagtattataaaaattacacaggagaaaaggaaatagaaagaagagaaagagataatttcattttattatctttttttaattattattattattttgatttactttattattattttgatttattttattatttttattaatataactaaaatattgaatatattcacatcataaaacccataacaaaatttattaattttgatttaatttaaaaaaccatccataattacttttcatttttgtcaccattgaaaccatatttttatcatttttaaattttttctgaccagcagttaataaaaaagatcttctataatattcaataggtgaagtaaaattgatatggatattaattttctttccagataaaccaactttaaataaattagaattcagttgaaaagcattattagtattttcatcattccattcaatttgattaatttgatcatcagcttcacctggataataattggtaggtgcattcagcagtagatttttgattgtattgaaacattcaaaattggatgaaaccattacttgtaaatcataatagaaatcatgtgagtaatctaatgggagataattaacaatcttgtaaatataatcaccttcaattattgttgtatcaaaaaaattataaacatcaccttcataaaacattggttggacctttacaaatattctgtattcagcataagagataataaatgacatttgtgagttatcatagttcgtgttagagtttgaagtatcaatctcaataattgagcaattcttttcatcaaattcatttatttttgcttccttcatgttaagttcatcaacttcaaaatctgaatgattaaatttcaaattaaaatctatttctgtttctttatttgtatcttcatcttcagggagtttcatcaaatcattagagtaaaaattcaattcaaagtcagataaaaaattatttgcaattctttctgtggattgttctaaagtttctggattgtattctaatgtaaatttttcaaatgtaaataataaaagcattgctataattcctacactgaccattgaattgaaaaggatactctttaataagtggtaaaaaatgtaaataggtgagtctaatgatttgataggagttgattttgattccataatggtggattgaatgtaaatatggttatggttatcaaaatcattggagatggaagaagtaattttaggggaaatatcattggaattagtggcatcaatggatttctttgaagaagcagatacaggatttaatttgttattataatcatcatttttatcaattggtttcatattaacattgttggaggcaataataagttcatttgatttaatgggaattggagtcaatgaattttgattgatgttttcattactaactggactggaaaataagttcacacatgaagataaactctgtttggaatcagatttagattgaattttaactatttcatgaactttatcaaatttatcatcttcatcagatgaagtggaataattaacatccaaagaatcaccaacagaaaggacttccattatttcataatcttcatgatcaacagcttgcatattaattatttcataactttcatttacaacagataaatggcgagtattagtgtctaaagaatcgacaacaacaggttgaggtaatggtacaaataattgtaattgttttttcaataatttcaacaactgggacagaagatttctaatgatttttcaatattttcaacaactggaacaatttcaagtttattagttttcagttcttcttgatttaattatttctttctttttgtcaattttcttgattctttgaggtttagcaattttaacttaattacttttctaaataataaaggtgcaatatttttaaaattttgcttccttttattcaccaactgtttaaagcgtcttggtttactgaagtgattcggtttagcagggaagcaattattctgaccagtcaaataacatacacaaaatctgaatatgttgaatattcatgcattttatggtcataaaaatcatcagaataataagcttcacaagtttcatcatcacttaacttaaatttgaatttattcaaaacagcatcaacagtgttacaaccaaagggcttatcatttaaatggagcaatttcgaaagtttgagtttcatagaatttaaaaactttggtctcaaataaggcatcattggtgaatcatccttatcataagtaattaaactcatttgaaaattaccacaaacacttttagg

SEQ ID NO: 11 - DNA, 135154 bp, Pichia kluyveri
  >Nicaragua_Y298_000006F_chromosome
gctttatacgcatgtattagctctagattttccacggttatccatgtagaacggaactatcaaataaacgataactgatttaatgagccattcgcagtttcaccgtataatgcttatacttagacatgcatggcttaatctttgagacaagcatatgactactggcaggatcaaccagataactacgctcagatgagttttgttaaggaatgattgattaaaacctacacatagcactgtttgactttcttcaacggaggtcccctgtacaaagtacagcttcgtccgcttcagtggagagtggtcccagatgtcacgtttgcacggctacatctccaaccccgtccccaataaacctagtggtccgctggctatcagctagcaacccaccggccccgtcagtgcgcaccacggtcgcaagaccacaatgcccctgtccaagacttgcgtctcttgtccccggccatacccaggcttgtccgtagacgcccctgcatactctccgtgggatcttggcctatcggtgcaaaacaccgctaagaaccgcattttttaagtgcttttctcatgtatatcccccggactgcgtaatcttgccaaaaattcgcagcgcgcggttgcgcgtggggccatggcagttaaattggacttcgttttggcgtgcaatgttttcgagcgcgaggtgaggtttttctttttgtcaatgctgctgagccgtcagccgtgcatgcatttctaacaaatcccaatttgcaaacttgcccaatatgccttcctacagcttcataattacatggcacactatacagagcatcctgatcaacatatctttgtaactaagcaataggacagaaactaggaaattttgatgtgtgttttccttcactgggcactgcccatggaatgtaatactcgcccgacaaaaacttccaaactccccagcgaatttaaaatttgaaaaaattcaaaactctcacagtctacttcccacgaaattcccacttcactgggcaacagtatcaacaccccccgtaactcccctctcaggccggattttccaattccaatctctgttctctactctccctggcctcttgtacctcctaccactctcagaatcctgacttagtgattttgaaatttctcatattgggtttctaccccccggctgcccatgaaaaaatgtctactgggcaactccccagtgaacaccctcgctgtgcatttttctcactttgccaaaatttccagccaagtactcacacaatttgtctgcttgcccacgaagggcctcttcactgggcatagctccactgggcactcccagtcaacttgcccatgaaaccacttctctccagatgaactttggttttgcccaatttccattatgcccatgttaaacactgttcctagagagtaaaacacgctgatcaaaactatccacaaggcatgtctctagctggcgtggttgtcgagatattcactgttgaagatgtacaatagaaggtcttgaaagctcaaaaaggcgtaaagttcattcaatttccaattaaactatatgaatggtcatgatagttgatataaataattggagatattatatgacatgctcacttaatgtttttgatgtaaaattttttcatttgaaaattctgaaagaaaaatgaagaaaacatccttcaaaaggtagtaatcacaatcttaattgtgaaaataagaaattctgataaatgtgcggattcaagaaaaaataaaacattttcaaaaaagtatggttttttcgcttaaatcaaaaatatctttatccgagggttgcaaatattcggctaaaactttgttctaacaatttatctacaattatgatttctccaatgatttaaattacaaaactaaaaccaacttttggacattgttaattcaaaattttcaaaattactaacattatatattaatagagataaattaaagagaaaaatgacaacttctttatctttattatcaaaatcccctaattcaattccaactgaattattgttgtgtggtggaattagcaactgagcaaaggcgtcatttcaaaataattggtaaataaggctcaaatccaaaaaatatttatcaaccacattgatgagtaacaatttcaccaaacattaactaaattttgattgaaaaactattattatcaggtgcttatttaaataaaagcgttgaggtattgaataataattttcaaccatttatttatggtaaatataatggattacatttaattgatttcgataatgtaatgaatttgatattttcaggaaatgggtaccaggtttaaattctttagccaaaaatgaaaattggtatggaaaaatcaacaactgaagaaaagaatgaagttattaaacctgatttatcaaaagttgcaattaagaaagcaaatcaagctgtaattccagcaaatggtataatcaattcaaaaattgatccaaatttagtaacatttctaactcctgcaaattccacttaacaagggtaacaaatttaattgttggaattctgggtaaaagagtatcaaattcgaatatagaaatttaatcaaaatcaaaaatcaatattgagtataaaaatcaatgagccatttattatgttggttaatagtagaattttattgttgaaaaatttgagtaagaaaattgttattatccgtggttttaaatagaaattcaaagatatattatattaactaaactaattgttaataattgttttaaaattctctttattgtcttactgcttgtaggttttttgaattgcatattacagattttagaacgtgttcaattgactaattaaattttatgttttatcaaattgacttcaagtttcaaaggtagtatgaaatcatccttctagggaacaaaatatatcatttgaaattagatccgattttgtccgatgcatgtcaaaaaacttctgcttttcccactaaataattgttattgttgaatcttttcttcctatataaaacaaaaacataaatatagtgaaattgccattcattcaacaagcaaatatttcagttctaatgcgtattggtttcctatgaagtattataactgctataatgttttatttcatttcaaaaataccaatttatgttaaatgcggtgtttttatggttattattttagttgatctaatcatattgtacatactaggatcagatgaagacgttaacaacttgtaatgagaggtaatctgtgtcttagaaaatacgcgaaatacgaagcagttaaaaaaatcatttttatcaattacccgaataatttacacttttctcaaaatgtttttttccaacggaatgagaactttaagttgggcagctacattttttgaaacttatatagtattaactcatcctttatataatcttttcaattaataaatttgaaataaaatttttaagtcttaatgaaacatacggctcacttggtttgaatggtaataaggaaaattgattattattagcaaattcactttatattgtaatattttctttaaaaataatacttggaattaaagattctataatcaacctcatcaacaacattatcgagttattaatcaaatcattcaaaagtttataaagaatttgatcgttttaatcagttgagttttgaattaataaatagatcattactagaatctaacaattatctattattttaattgattatcacttatcattcgattcttcagaacagatattatattgatggatatttgctaatttatttattaactatataataaaattctttttatccttaatataactaaatactatttaagtactgattatctttgatagttttcagttcataaataaaagtgcatggtgtttgttaaaataataattgaatgcagtaactattataacattcacctgattaggaaatagctaccagattaggaaatcatcacggattaagaaaatgattctaaaattaacacagtttcttatctttggaagcccaaatttgaagtataaatacatcatcatttcctctaattattacaattattggttctactgttattactctttttcttactcttcttcctataatttttactccttcaactatttctattgttctctattactgtaatatactcaagatcacattgaataaattaaacaaattacaaaataattaatacaaaatatagctttatcaatatcatcaaatctttagaaaattatttatcgattgaattatttaatataaatatttcaaaaattttataatatttaaagaaaatttcctttaatttaatatctaaaaatgatttatcatttaaacattcaataacattaatatcattgaaatatttaatcatataaatataacaaattttataataaagttttgaattattacatttatgtttggaatcttttaacataaaccaacatttaacacacctttttttataattttgaaatattattagatatgtttcataatttaaaaaatggatcattattcaaaaacttcataattaaattaacatatttatcatttgattttaaacaacttttaaacaatgaattgaaatcttccttatcttttttattagttataattgaaagtttattaaccttttcattataataattttttaattcaattagtttatcatttaatttgatattatctttaattaacttattaatctctttaaaatttggatagttaaattcgataatttctaaatcacttgaataattgttttcaatatttaaagtttcattaagagtattaccattttcatttttatattttataatcttttcaattgatggtgatgatagaggtttaattggttcaattggtaacattgaaattttttctttaattaaagattgattatcaatttcagttaaaattatattagtttcattagtttcaattgatttattattaaatgataaaatatcattattaattgaagattctaaaaatcttctttcaataaaagtttgtgattatgagttcataatctttgaaatattttcacttgatgatttatttaatatagcagttaatgataattcatccttattaaacgaatctgatttttataatcaattgaattttgatttgatattaagtaaatgaattctttatcaaatttaacaataatacattgatataattgatatttattaaaaggaaatcttgttaaattaataattttatcatttaattcttcaatatgaataaatgatttatcaacatttggtaattcatcaattataacaaattctttattatctttaatatatttatataatctattataatcattttcatattctgtaccaataacttttgatgatttaccatcaactatagaattattttcaatcaataaattaaattgcattgtttaataataaagaagaagaacaaagaagaagaaaataaacaattcattaaatgaaaaactttaccaactttatcatagttattatgaatataatgatttgtattattattttaaaacaaatattctttcaccaataaaacttgaaatatgaatacaaataaatattaaaattatattatttgtacaacattcataattattagtacgatctccaattgaacattttttacaaatttttttatctctaccaaatgaaaatcgtctctcaatttcataaacatcattttcaaataatacatcatcttctttaaaataattaatcaaatgattgaatttactattgtattctttttgaaaacatctttaccataaacaggtacagtagaatctctaattttaaattgttttctatgatcaattctttcctttaaatttgataaatttatctcatatttctttaaatctaatgaattaaggttcatatttttataataatcatccaacttttaaatttagctgtaatatcattaatatatccatcatagtcattataatcatcagtatcatcattaataataattgaatcatcatttaaattatcatttaacctactagattttctttcttgaatcattgaacctgcagatgatggtacagaactaattgcagttttctttgatgtattattagaaactgtaatattattaaaagattcttcttaattctaatttatcaaaatattctttatgagttttcttacaagtaattaaaatattttcattattaataataccaggttgagtatttaaataaattagtaagataataactttaattgactaactatatgtagatgaaatgttttcttagaataattgtattaagcataacagtgaagttttcattagaatcatcaataaaatcaatatcaaattatactaattctagtggtgatgttcttagtggttgtgatgatttaagtcaatgattaactacaaagaaacaacatgcactccaaatgttgtttataaagaaaactgtgcgcttgaagcggtttaagtagttttgaaaaccaattaatagagatcttcacttctttcttattcagctctttttggcacggatattgtttagttatagatgtgggtatattaaatacactagttaatatacacataaatagcatataacatcaggtatatgatcttccattcaatcaaattgcctagtcgttgtttacagttattcatttatatacctgattaggaaatggttgctccattaggaaatcatcacagattaggaaattgatttgaaaattaacataatactcaaaggaggtgttgattaattaactttctcttattaaaagattgataattatgtccattggaacaaatctcctaattaagaatctgtttttacgaaagtggtgtggaaataatgtttaaaattgaactcaaataaatttagcaaatttatagcttaaatacaggtactccccactttaaaaaaaatgaattctattagataaagattataaattactagtatactataatatttcaataacttctattttttcaactaaattatttaattggaagatattgtattacatttaattcaccagatattatatcttcatcattctttaaactttcataaccatcaaaatattctctataaaagttcagaaagacttcagatttacataaatttcctgattttgaatcatctgtatagaataaaatacatctaacaaaatgaaaaattgattcacatatttcacttttctttttaaacgtaatttcttttccatctttatcaaagcaatatttaaaaataaatgataataattgtttatcacataaaacaaaaaaagttaaaacttgacaacctaatgcaaatttataaacatctgaatcataagaagcttctgaataaaattgaattaattttaaaattttatcatcaatattaattatatcatcaaaagcttcaatattgatcatacaatcaataaattttttgatatacttagtattaatatgatcattaattggtggaaataaaatttcatgaattattctctcatcaatttgataattaggaaaaattttgataaaattaaatctttcatctttataagattgattaataaattcaatcaattcatctatatcttcaaattcagatttcacaaagtgttttttataaacatacatatagatattataaggaactttcgttttattttgaatttttgaacttttaaaaacattggttaaatttgatttatttaataaattttcaagttctttaattaatttgaattaggttaaaagttcgtttgggttagacatgttattcatcatcaattgaaaagattaaaacatgtttaatgaaaatatttaattttgacattatttgaatcatttcattcaatttaacgatacaatcattatcaattaaacaactattaatacaaattgaaaacatgattctatctttaattaataaatctaaaattttttgaaattgtataattttatttttcaatactctttcattaacattaatttcattatcaactctttggaaaaactcaatatctttataatctttaattttctttaaaatatcatcatttaaatcaaaataattttcaaattgtttcaaatctaaaataatataataaaaacaataacatgtataataaaactttccaaaatcaattgaaacatcagttttaaaataatcaagaatcttaacttttttattaaacttatttgaaatattcatattgattgaataattatactttttctgaatgtttttaaagtttttatcaaaataaattttcattattgaaaattctctataaaaagtttttttaatttggaaattaattttattaagctttttattgaattcaataatattgaaaattctatttaaagaagtatcaatataaatcatattaataatttcaatcttttcatttaacttttaaacttttttaagttttcttttatcaataatttctttaattttatcattaatttcttcaacttctttatcatcgttataattatcatcattttcaacaatctctttcctcaataatcattagttgtagaataaaacattgtttgatctcttaaatagaaaactttaataagtatattatcataatttcttattaaattcaatcaattccttaaaatctttaactaaacaattaacaaaaacattagaaggtgaaactgcctttctttcaactttatcaagctaaatattgttgaaaattgaatctcttgaattaattaattgtataataatcaaaccagttttagtggattcgtataaataaattttgttattattctcatctgctaatttacaataattatacttgattaaatattgaaatttgattttgaaacattcaaataaatcaccataatctgattcaattataatctcattccataataatgaaagttgtatttggtagttttttagtaacaaagaaagttttaatttgattctaataaaagaattcaaaaggttgatcatactattcatggtcatagctatataaaaaccatgttttttattcgattgctacgtaccaaccaaaaaaatgaagtaatggtgattctagtaaaaactagattaagatattgatatgttaatctatgacaaagaccaaataatacttgctctataaagaactatatacgacaatttacttaacgataatgcattaatttgaaaataaacaacgttgtccattatttcctgatattacgtaagtaatctcttaataactatattttaatccaatcacagtgaacaattataaatgatgttgtttacttgaagaacttataaagtgttttacagtattttagaactattgttattcaaaattagaccatactaattttatcaaaatcgaatttcaaattcattaacattttaatttagcatgtcattattttccattatcatcaccatgcattagttcatcaactatttcaatttcagttactttgaatttataagttgtggtaatatcatcactcttaaacttatctaattcttttttgggtaattcaggtttttatggcacccctatttatttgacaaatttcacaacatcagctatattaccatcaaatttgattttaccagtttcaaaggtgccaatttaatgatgcttagcaaataatacaataaagtattcaccatttaacatattatcataatttatatttgataaactagtagttccagtgtatcgtatgcatgatcatttcatttctttatcataatcggcgtatttagtacttactgaatggtttttttttgcaattattcaaattaacatcaaatgatattcagtactgcatattaaggagtaaaatgccaaattgaaaactttctataataactaataattagacttgttggaataagcataaaatatatgtattaattcatttttcataaaatactctcaacttgcttactatataatttgaatagcttattcttaaattgtatatcatgctaaagcacgaatatgttatgatggttctttaacttcttaatattagtaggcatatctttgttttaattattattatctagcattaatagtattatttcaatcatacagtattatgtaatggagccaacactttgatactcaatctaattactattttcatttttataatagattaaagttcctgatattccatttcttggtattttcattattggggaattcttaattaatatcggttgttgatactaaactaattctataccttcattacaacaataattggtacattcatcagtgtatatttattcgaaatgtaattcatattcaattcatcaatctagatttgagctgcaacgccatttgaaggacatatgggattttaaaagttcaaagaatctaattggtgaagataaagaaaactttcagaagaaaagttaactttgtttgttaataatcatgatgtacttcaaaaaccatcatttaacatatacccgaaaaataaccatcattaatatcagtaaaatgtcaaatacccgaaaaaagggtacttttctcaaaaaaaaattttttcaacggattaaagaatgtccttagataagctatgacatgagatttgttgcttattattagtagtttcccattttgttaacattttagtcacttttaagtagtttgccatcaaatatagtggatattggttattagaaacactcaaagatgtattctagtcacttatttatagtaaaaagcgtttatttctagcatttgaaaacatgagaattacctggtatcgaatcattttaatttttctgagtactttaattaccaaatttcattttcttaatttgcagctaaaacttatattaaaaataccatcaatgaaaagagaatcaaaaagtaaatttataccgtttaaatggaaaaaatattaatagctttgtccttaaagataagagtaaaacatgtaatttcggtataattcaaatggatgagccgccgcgtagaaatttagtagtgagccttcaaattttattagatagtagatagtagatataataaagagtttaatacatgaccattgggcagtctgattgttgaattgatgaataaataaatagaagataaaacaaggaagaaaagaaagagaaaaagatagaaagaaagaaaaggttcatcaatttaaatgctcatcattctaatcaatttgaaggctcatcatagagcttttgttgatttgacatcatcctttaactttagtaatgatatgaaaagatataacatttttacgcaataaactgattgactctaccatctttatttttgtctttattatcagtattatcaacaggattataatcatctttactttctaaatgtgccttatcaagatttttagatatctcactgattaaacagtctgatgctgaacatttaaatgcaacatcattatatactttaccaatcttaatttgataatcagtttcaacggtaaaagatggtaaagaaccaatttagatgattgtttattagacgtttcaacatctttaaataattcctctaaacttctaaacatttcataagtttctttataagatgtctaaacatataaaaaacctctttattgttaaagttgataactccatagtttatagaatatgatttctttttgataaaatgcgtttattggtttatctggaaaagtatcatacaattcatcatcaatcgtcgaattactagtaattgtaaaggtattgtttagtgttattcattatttgtttggtatgataaagtaaatccccaataaaacttataataaaaggaaaacaatcttatcgtaggcgtatcataacgtaaagatattattattaacaataaaaataacttaaagcctatatacccttatacattactatgaaaaatatccaaaaaacaatctttatcatattctaaacttccgaaaatagtatttattaatcaaaaaataataatctattcttatcacattgcaaaccaacaattacatataaggaatataacttcattgaatatttataatcaactgatttatagccacgtctaccaatccaaaaattatacaatatataggtaaatctgaaaaaacattgtttatcacaaaaccttctcaaacagtttgaacataacacatcattaaatggatgatttaactttttaacaatttcatgcataccagttggaaattccaaatcaatatcaaaatctctataaaatttatcccatctattcatatatctaatatctctagaatttattaatttttgagctagttggagtgataatctattaaaattatccaatgatttatcatcatatttttccataaaaatatcataaaatttatcagctaaaacttcaacatcatcaccataatttaaaactaattcatcataacaatataagaaaaaaggatcttgaataattctatgaagcttttcattagatttattaacatcattcaattgaatatttaatgagtttacattcattctatcccctaatactcttaatgaaatatcaatacttgattttttaaataaagtatcatatattctcttaaatggttgatttgtaactttagaacaacaacaatcatgaccagatgtttgatcattcgtgacataaaatttttcaaatcttttcctagcacaaaaattatctgtagttacaactagaccttgattcctaattctaccaatagattgaattatatcatgatcacggaaagcacaatcatataatatcactaatgaaatattttgtaaatttataccatacgacatattcttggtggttaataaaattttctcattgttataaaatgattcaagtaccaaagttttctcttcattatctaaatcaccatgaagtttatgatacggtaaattcaattttttcaactcttctttagatttaaaaaaaacaatacatctagaagctaatgatttttcaaaattaaacaaaacttctaataaattcaaattctttttagaaaccaagtaaaaatttttgattggcaattccgtaacaaatgaattataattcattcttgatttaatatttaataattgaaatatttcgtaacattcttcccttttgatggtagcagaacataataatattttatcaaattcattaaagttatattgatgaaattcatttataattttcctgcatgaactttctttagcaattaaatgacaattatcaaataaaattattcctttcaaatttttttcaattgaattcatattaatcttattgaagtcttcatatgtacctaaatagcattttttcaaacaactttcattaatatcatcaactattttttcaaaagagccaaaatagccaggatatttctcatgcttatcaaactttgatatactgtaaggtaccactaacatattcaatttattgacattcaaatcaaacattatcttggaaataaaacttttaccaaacccagttctagcttgtaaaatatagttatgattagatccattaatatcatataaacatgaacgttgttgatctattaattttatgttcaattttttcaaatgtttctcaatctgtagaggtgtaaattttattggatttttattgaaataatattctatatcaccattcgtatctgcagttctatcattactttcagtcttattcaataaatgatcccatttaatcatcattttatgattctcagataaaagaacatctttagggaagtaatcaagatatgcggtaaaaaattgcctaaacaacttaaagttatattcatcactaaaaattccagtgaataaagttctaatagctgcaatatcaattttagttataactctctctttaatcgctatgaacaattggttatcaataaaaatcaagctatcatgatatgaattctcagttttcaaacatttattatcaaaatccttcatttgaaattcatcattttcattaaacttcaaaagtagcgatttaaaatcaatagtatcatttttcattgatagttttgaaaaaaaactagataatggtaatcttatagtaaaaaaatagtgtaaaaaaatcttagtaacttcaccattgataaatgaaatcatttcattagttgatctttttttaataaagagatgaaatttattagttgatggatctttatgtataaataaattattgttattttcaccaacctttaaatcaaccaattcaaacattcttaacactccaccagatgataaatacattaacaaaataacaatatttgtacatctattgaataaaccaaaaactttatttaaattttttctaatatcttcattattaattgaataattttctattgattccttaaaattttcaataaaactgccgttatttctatcattaaaaccttgaatcaaagctttaaaagtttcatttattggagataatttgatctttaattttagaaattggctaacagtttcatgatacatagcaactaattttctataaccctttgatataatagtagagttcaataatataccaccaatatagtaatcttcaccttttataataggtattatacgagttttattatcttcattggctaattctttataaattatattgaaattattatagacaatgttaactttttcaataactatatcataatataattcattaaattgatactcatttaaatatgataaaatatacttgataaatcgattaattgaatgaattattttaacagcagatggtatgttttcaatattttttttatcattaattaaacataaatttaaacaaattgaaaatgattcttgatcgtttaataataaagttaaaattttttgaaacataaaaactttcctaatgagccgttgtttatcctttttgtattcaaatgatgtatactcttcgatttgattaagtatttcatcatcaattttgaaaaaaggtttaaatgaatgtaagttcatgatataagtataaaagtcggatgaaatttgagtatactctctaatagttaaagggaataacttagcaatacgttcatcaatattagtgtccataattgtgactgagttacaatactgatactcgttatagttatttgtgactaggaaattgatttccaacacttcagatgaatatttatacgagattggtaattgaatctttttataagtttcaacaaattgaattatattgaaaactttattcaaagttgtttttctataaacatcataattgacattatcatttgaattatcatcactttctattaaagttgaagtattatccgttgaatcggatcccattatgtaaagtgctgtgagaataaattcttttaatgaaagaaagaagtaccaagggcaaaaatgattacaatcaatatcatgtctttaaatagtggaaattgaatgagccttcaaataagaaatgagccttcaaaatggatctaatttactaatttaaactaaattagtgtgataagtagattaatttggattaaattgaattattaacatgattatcgttcttaaatgttcttaaatgttcttaataatcgttataatcactataattgatttagaatgtgtcatactcgtatttatacttagtttaccttgtagacagaaccaatacttagatggtaaagttaggtgttataaacaaaaataaacaaacattttaataagaaaataaatcttaggtaatcaaatttaagaattatataaaaaataaatagtctcgaattccaaaatttttggctgcaattttcttcaatgtaatatactctttctttaattaacttaccaacaccagagttgattcctaaatgattgtttgaaaaatccatcttatgaatttcattgaaatttccatgcataaataaaggaatcctatggaaagaatttgtaggtttatctacccatttttcaacaagatgaagaatcatgtgagtaggtaatgaaaaaacattcttttaaaaatgaatgcttttcatataaatcttcaatataattcataaggtggataaaattatctttgtgcttaggaatatcatcactaggaacttctctgctgaaaaaaagaagaaggtaaaaattaagttcgaccattaatctcaaaataagattcatatcagaatcatcatcagaatcagtattaaaagcatcttgaaagataaatggaaataaaaacataaagacaattgtatctactgcctttaaacgtttatttggtgagtttgcagtaaaaaaatgtgtccaaatttgaaggttctttgattaaagtttcaccttttcaacaatatccaagtattctctgaataattctttattaattttttcaagataactaccaaaaaacaatactgccaatatccttttagggaaaacaccttcaagtgcaacatgcatcaaatctggacaaattatcttcatgaaatcaacttccctatccaaagaaaatgcaaaatcagctttaattgaccattctgtactatttttcttgaagtttttatcatctaccattttaaatccatcttcagaagtgattattctaaacgatttaagatctttaaatgataataatccttgtttgattttttgtttcaaaactgcaacaggtttattcgttttaactcttttatttttattcttactcattttcttctttttagtgctactagaagcactattcacattattgatattattattgattttattcatattatttacattattgatatgattattaatattcattggatttatattcatattcacattgatattattattaatattcattggattcatattcatattactattattatttggattattagtattgttgttatcatcacaaaaaatctctttcacatagtcacttgaatctatacgcaactgttggaaaccactttcgtcctcaactatttcaactttagaactctcttctacttcttcgttatcatgaatttgacagtctgatctcttttctcttcgaatattacacaaataacatggatgatttgcagaagcacctgaagtctctaataatgaacatatagccggaatatatgcggtgtaacacaccgggttaatgaatattgtatactcaacaccgtttcttttgattttgaaaccttcatctctcaaatgttttaaatctacaattaaatgtttcatcatttctctattaactccaggggactttttaatatacttgaaaaacagtggaataaaaatggattgttttcttatctctgctggtaagtcaaaaaattttcaactatgaaacatatagattaaacatttttttatcatgaacattacatccatccatcgacaatctcaaattaaaaacaaaggagtttgaaacatctttgttgatctctttatgccttttgaaatttgcaccttttccaattctatcccaaaattctggatgatcttcatttaattttctttccttttcaattctttccattagtttttcattcaaaaaaattaatgccaaaagggaacgaatactttcatatctcccagtagtgattgttcctgtacacaagtttttaaatttttcttaactgtttattttatgctaagatcaagtaaattcataatataccagatgactataaataagaggacatatccctagttatatttttatattacattatataagttagttcatttaccaagtaaaactatattaatgtatgtattgagtataagatgctaaacgaatatatttacagttaagttttcttatattgaatatatgttgaatcatcttctaaaaacatttctcaaagatcaggcattctataatttgtttagtgcttaaaaaaagtactggttaagttattaacaattatatctcttgattgatgaaatttgtatcacaagcttaataagtttaatccaacttgtttcaataggaactataataggttaatcatcttaattgtctcatatagatgttttgctaaactttgataaattatgttatcaaaaatatactacttcattcattaaatcaatatgcttcttattaaattacaatttgaattttccttattaccggcaaggacatcttatactcatttatcagtctcataatattgtgctccgacgtgttgctaattatttaatccatatatcagattactttgatcatagaactgatgacctagttaagatatgttcatttctaaaatttaataagagaacctcgtttgatactctattccagaactactttcattattagaatcaaatttgtagtacttggtttaaatattataataaatagagcttttattactccatttcatcactaacaaagaaatattctttcatttttctaattatatcaaagtgaatcttcgaatatttattttcagcataatcaactcattgttaatacaagcaattttcttaattattaatacttatccaggtccttcataacaacaataagtacatcttcagcaacataatagaaaaaataaacaccttcaaaggatgattattggataatttgttatttaatttgttaaaagaacgaaaaaaatgcatagaacggttaccaatagatttttcaaaaacaaaaaaccatttaaactttacaattaacccttattggtaaccgttctatgcatttttcccgttcatttaaccaactaaataacaaattatgtaataataatcaaactagttcactccagtaaatgttcaacccaaaattgatcatttaaatgtagaaagggaagaaggtaatattgttgttattcagataattcagagtcagaagacttaatgctaaatgaaggtttaacatgctttctctttcttgaaatgtatttagattttatatgggaacgtttttaagatgataatttccttttttgttttgattggaggtttttcattttctgctttgaagcaataatttagcttttgtagaagacatagttagctagtataatttaatttaatttggaacacaaacactagccggtgctaccaaatgaaattgagtttatctgatatagttgataacttgatggtagtgataagtatcaaataaattcacttgttggatcttttatttgtgaaatggtaggcaagataaaactagacagttggtatatattagttagttcaatactctgattgatgtcaatacaagcccgagaaataaccatcataaaataaataaaaataccaaatacccgaaaaaagggtacttttctcaaaaaattattttttcaacggattaaagattatccttagataagccatgacatgctgtttgttgcttaataatagtagtttcacattttgttaacattttagtcacttttaagtagtttgccatcaaatatagtggatattggttattagaaacactcaaagatgtattctagtcacttatttatagtaaaaagcgtttatttctagcatttgaaaacatgagaattacctggtatcgaatcattttaatttttctgagtactttaattaccaaatttcattttcttaatttgcagctaaaacttatattaaaaataccatcaatgaaaagagaatcaaaaagtaaatttataccgtttaaatggaaaaaatattaatagctttgtccttaaagataagagtaaaacatgtaatttcggtataattcaaatggatgagccgccgcgtagaaatttagtagtgagccttcaaattttattagatagtagatagtagatataataaagagtttaatacatgaccattgggcagtctgattgttgaattgatgaataaataaatagaagataaaacaaggaagaaaagaaagagaaaaagatagaaagaaaagaatgagccgttactttttagtttttaaattttagtaatctttaaataggggaatctaaaaaattgattataaagcattatatttggattaaagataagaacgattgaaacaataaaagggtggttaaaaagcactattttgaaagtgcattgtaatcacctaaacaaccacctggtgtaagttcaagagcataagtttcagctaaataatataagatattatcagtattaataactgcaaatgatgaattattttcagcatattcaattaactcatccgtttcttcaacatattctgcaataaaacctttattaatactatcaatatgtaagaatctatgaaataaatcaatacctgcaaatttttttggaccaacatcagtaatattaccaattacacacatatcttcaattggtttctttgaagtgaaaaataaatcacaaataacagtttcctgtgatgcattaaccctatgataaccaggccaagttgtaggatgtgaagcacatgaaccttcaatatcatcacatctataaagtgcaccatcctttttaccttcaacaatattatcaataacacctaaaacagttaatggattaccattatcaccaaaccaatgttcaaatgcttcatcaacaccttcattaattaaatgagatcttgcaatacttgcaacttctaataaatcttcataatatttattaattaatttaatttgagttgcattacaattttcaattgttggataagtaacatcagtccaagttttcataaaatcatcagaaaatccaacaatttcttgtgaattagttgaattagatgttgaattagatgatttaactggtaatgctaaagttgttgataaaagtgatgcaataattgaaattgagaacttcatttgatttgttgtttgttggaaaatgataatttctgaaacatgtcattaaatacatggattttaccccagtttaaatagtaaatggttgagttcaattcaattaaactttatttagttaattggattattatgttgcaataatttaataagtcaaaccatcaaggtacatttgaacttatcggagttctttaaaacaacaaattgtagttattaaatgtaacattcttcatatatgactgttgtaatttaatcatactttgagtactccaatggttagtccaatataataaagggttcggtaccttaatatattgtccaagggtttaaagaaaaccctttttcacgaaatgtcaaaatctccaaaatttaaaaaaattgggtgcttcttgaggttgctttaaaaagagtttttccacttattaacatctcttcattcttttgattatttgtattatatttctttagatagggttcaacaactattcatgaggacatatgtagttgtttgatccttctgcttttttttctatatggaatagaattagtttattactatttatgttaaaattttatgtgatgaatgaaatacattgaacgcttgactactgaaattattggatgagaaagtgttatatctgaaatatttttaacataataagctaattcttttcttcatatactgtaatttgttactgtaaatatatcatttaactatagaatttaaataaaattacgaggaattgtatcttcaaatacttgatcaacaactaattcaccattttcatatgctttacgagtattagttaaataaaaattttctgcatctgcctttaatgttgaaacagtatcaagtttaattttccaattatcactctctctacccatttcataagtccattcacatgtatttatagctgataatggatttaaaggttcaattttccaagtatttttattaatgtcaccaaaataaaaacctgaaattttatcattattattaatttctgtacaaccaccattttgaatatctgttaaagtccaaatatctttaccataatcatattcaatatttttaatacgatcataaggtctaattttccttaattcaatatcttgtttcataattgttggtttaccgaaaattggtggattaattttattattatcattaacaattggtaataataaattacctgaatgtaaagttaaaattggaatttcaggtgttggccaagcttgaggccaatcacatgtagataatgcaatacgtaatttatgacctttttcaagtttaataccaattgcatctaaatcaaccctaattttatatttttcatttggtttaagatatgatgggaattcatgagattctctatgagttaaatttaattgaccccaagaaattaaaacatgttcaccatcatttggatataaatcaactaatctaactgaaatatttgctaattttttatctgatgaaattgttaaatcaataaatggtaaaccatataaatcaatatcattttcaaaaatatttgaatcaaagcataaacatttagaatcttcatttttttgatcaccggggaaatcacctttaaaaccaaatggacaataagtacctctaaacataccatgagataaagtaccactaaacttaacatcataatcatcatcaattgtatcagtatctttagattcaagttttaaattattaccatttaattttaattctaaatattttttttcaattggtttattagttgaaatccatctaccttctctagaaatataagaatcttgaattgatgaaggatcttgaacgaaaactgaaagtcttggtaaatttaaattattttctctttcagggtataaccatttagcaaaccatttagttgataattgttgataatcaattttaggtgaaggttctgccatttcagggaattcatgaacccaaggaccaacaatacaggcagaattttcatttggtaaattatcagccattctgaaaacaggatttgtataaccatcacgaaatccaccaattgctaaaattggtatatctaattttgaccaatcttcattaattgaaccatgtttccaataatcatcccttgtttgatgtttaatccaattagttaacattggaggtacatttaatctatctaaccaattttttttccaactatcaccaacaacttttggatcttgaggtcttggttgataaactaacattgttgacccccaccaaagcatatcacttgctaataaacaaccaccacgataatgaacatcatcagaatatctatcatctgttgacattaaagttataatagttttcaaagcaggatgttgtcttgcagctaattgtaaaccattaaaacctgcccaagatttaccaaacattgcaatattaccatttgaccaatcttgatcaacaatccaatcgaaaacttttaaagcatcatcttgttcaattttcaaatattcatcaatcaatacatcacttgaattacaagaacctctcatatcaactctaattgaaacaaacccatttgcagcatagaaaggatgtctaactgaatctctaataattgtaacatcagttctataaggtatatattcaattaaagttgcaaaagattttgatttatcattaaatgcaccaattggtatccaagctcttgcatgaatataattaccattatcatctaatttaattctaatatcatgaacagtttcaacaccgaatggtaaaccttcggcagttataacttcagttaaagcctttgggttattatttctaacattaaaggccattctgtttgtgtgtttgggagaagaagaagatgtgtagtgctaagaatgtaaaatacttaaggaataccactaactttaataatagaatacactccgaatgataaacagcaaattgacaaatcagataagaccttatcaaactgataaagagtgaacaaagtgaaaaaactgtcaccaaacccaaaccgtcggaataaacgctttcaaccgccgatcgcaactggcgaaattacccactggaacacattgggggaaagtcctagcgaggggggagcacccctgataagactgattcacagcaacaatagataatagaacttaagatgttaatgttactttctctatctattgtcctctagtattactatggtatagagtatgtcgacacgaccgagctgggccgcgagacagttatcaatgacttatcgtcatgtctacaagacttatgatatcattattattaagaaataatgatcatttcagatcaaattgaaaaatatcatattcaaccaaccatttacctcactatctatttactcttatcagttatttctttgatatttttcaccacaatctgtcattctcttttcttttttctatttctatttctatctctgtttcttataaataccaccgttatcctttaacttttaacctttaatcttttgatctattttaactttcttctatcaaactatcttaccattactctcatttaacaaaaaaaaaacatgtcttcagtagaaaaacaagattataaaataaatgaaacacatggttcaggatctgatgatggatctattgttgaatttatggaaaaaggtgttcctggtgaacttaatgaagatttaacaattgttgaatccggtgatttagtattacaaaagaaaattcatctaattaatgatgcaattgatgaaattggttttacttggtttaatttacaacttttctgtattgcaggtttcggttattccgtcgattctcaaatggaaatgattcaatcttctgttaaaaaatatgttgatttacaaatgaaaggtggtggataccctattggaactgaaattttctatgctggtttaattgttggttcaattttattcggttttggtgctgatatgattggtagaaaattagcatttaattcatcccttcttttaactgcaacttttggtttctttactggtggtagttcaagttatgcaatgtattgtattttcatgtttttatcaactcttgcagctggtggtaatattgcaactgatgttgcagttttcatggaatttttaccttcaaaatatcaatatatgaatactgcaatggctgcttggtggggggttggtcaaacaattgcttcattaatttcttgggcttttattccaaataattcttgttcaacacctttttgtccatcttcagaaaatagaggttggagatatgtttggtatgttaattcaggtattgtgatgggtgcagctcttttacgtttattcgttttaaaattagatgaaactccaaaattcttagtttctacaggtagagatgaagaagcatttgaatccattatgaaaattgctaataaatataatagaaaatgttcattaacattggaacaattgaaagcatgtggtgaaattgaacatacttattttgattcaagtaaagcaactaatgttacatctgcaattaaagaattatgggcaacaactaaagttaatttagcaattttattctcaaataaaacagttattagatcaacagttttaattttaacttcatggatgtttattggtatttcatattcagttttctataatttcctttacatttatattgcaactcatggtggtgatactggtgatagtaattatattgtttatagaaatgcaactttagataattttacaggtattttcggtccaattttaggtggtttattaattatgattccaaaagttggtagaagaggtacaatggttttcggtgcattatcaggtatggcaattttatttggttatacaactgttagaactccaagtggtgatgcaggtttcggttctgcaacttattttttcattaatgtttattattcatgtctttatgcttataccccagaagttttcccaacaaaagcaagagcaacaggtgttgcaatttgtttagttgcaggtagaatttcaggtgcatttgcaccagttgtttattggtttggtgaacaaagtggttcaagtgttccaatttgggtttgtggtggtattattggttcattatcaattcttgcaatattaatgccttttgaaccaagtaaacaaagatctgtttaatatttgtctttttttttacaatcttttagttcttttaaaaatctctgtttctttacattatatataaaaccattatactttattaatatatccgtttaattataaaatcattctatcaataacatgacacgaaacatgttacgtgtcttagagttgcacgtggattgtcatttttcacatgcaatttgaaatttacgttatttttttttggaggctcaacacttactaaagaggtatttaaatcaagatgatttcctcttatttttgccagttgctttcttttgaattgaatactttaagacaagatataatgtctgatagtataaacgtggtgtcaaaagataataataatcaatttattatggaaaaaagtgattcattagatgaaatcacctctgaaagatataatattaataattcatcctctgatttcgattcagaggagaaaggtgaatcaagtctcggtgatgatttaacaattgttgaatccggtgatcttgttttacaaagaaaaattcatctcattaataatgcaattgatgaaattggttttacttggtttaatttaaagcttttctgtattgcaggtttcggttattcagttgattctcaaatggctatggttcaatcagctgttaaaacttatgtcgatttacaattgaaaggtggtggatatccaattgcaactgaaatttattttggcggtttgatcttaggttcaattatctttggtttcggagctgatattattggtagaaaattagcttttaattcatcattattgttatcatcaatatttggatttttaacaggtggtacatcaagttatgcaatgtattcaatttttatgtttttatctacagttgctgcaggtggtaatcttgctactgatgttgcagttttcatggaatttttaccatctaaatatcaatattcaaatacatcaatggcagcttggtggggggttggtcaaactattgcttcattaatttcctgggcctttattccaaataattcttgtaaagaagctttttgtccatcatcagaaaatagaggttggagatatgcttggtatactaattcaggtattgttttaggtgctgctcttttacgtttattttatttaaagcttgatgaaactccaaaatttttggtttccactggtagagatgaagaagcatttgaagcaattaagaaaattgcaaatcaatacaatagaaaatgttcattaactttagagcaattgaaagcatgtggtgaaattgaacatacttattttgattcaactaaggcaaggggtattacatcaggtctaaaagaattatggagaactactaaagttaatttaagtattttattttcaagtaaaattgttattagatcaacaattttaattatgatttcatggatgtttattggtatttcatattcagttttttacaatttcttatacatttatattgcatcacatggtggtaatacaggtaatacaccatatttagtttatagaaattcaacaattgcaaattttgttggtattttcggtccaatattgggtggttggttaattttattaccaaaatttggtagaagaggtacaatgatatttggttcactttcaggcatggcaattttatttggttatacaactgttagggatgcaagtgcagatgcaggttttggagctgcaacttacttctttatcaatatctattatgcttgtctttatgcttatacaccagaagttttccctacaaaggcaagagcaacaggtgttgcaatttgtttagttgctgatagaatttcaagttcatttgcaccagttatttattggtatggtgaaaaaagtgggtccagtgttccaatttgggtttgtggtgcaattattggatgtttatcaattcttgcattctttatgccatttgaaccatcaaaaaagagaagtgtttaaataaataccttttataatctttttttaatatataatatatattattcttaatgttcctactttttcaaataaggaaaaatccagtttcctttcttacacgtttaacagaatttatccaagaatcaccagtattccaagtatcttttaaaattttaagaacatcaccagcgggagcattaccacctaaaaattgaatattaaatctttcatagaaaaaatcacgatgatccccatcaattgattcacaagctgcaacaaataatgggaaaactgcacaattttctgtattacttgcagattctatatcatttttaaaatatttataaactttaccaaccattttttgaacaattgaattagatcttggaattttgtaaactcttctatataaatgaatgattcccgaataataaaatacttcatttacaacatttaataaatgatcagattctgttggatcattttcattttttttagaagatttaaaagatttataagcagtattaaattcaaattcccattcaattgcctttgataaaatttcagttgaaacagttttctgatcttgattttcatcttcctctaccatatttaaaattggaattaatttatcgaaaattaaaataaaattaatatcaaaacctaagaataaatcaatttttgatttagattctaattgataattagtgaaaacaggatttggtctataaggcattttaaaatcttttggagaaattgccatcattataccaataatttctaaataaccaatccaattaattaaaaaatatgataatggattattttcttcagatattaaatatttaccatttgataatttaataactttatcatcattttcaatatatttatggaaactatgtctagctaaatcaataatctctttatatctttcaatttgatttcctgaaaagattttttgaatacataggaataaagctgtaatacaagaaatttcactttttaaattaaaattagtgaaaagtctatataaacctcttgaagttattgtttcaattaattctaatgagaaattttcatcaaataataccaaacttctatgagttaaagcatgtgcaactaataaatccattaaacaattattttttttggcatattgaggaattaatacatgcattgggttatctttataaagtttaggtttagcacaaacaatgaaatgtgaagtaaaatgaacaaagaaattaaatgcatcattataatatggatgatctaataagttttcaggtaatggtagtaatggaatttcacttttatgtatgaatgaagatactgtattttgatctacattggtattgataatagtttcatcttctttcttatctttctcattatcattttcatgagtatcattatgggtatcatcaatattattactattctttaatttatcaattttcttcctctttattgggaaaacattaatatattcatcatttttatcagttttttgatcaacacttaacaattctctatctttaataatcaatttctttttattctctgcaagtttttgattttgaaataccatttcaaatgaataaatacatgttataccacgtttttcgcatcttgaacaagttggttttaattcatcacatttagcctttaattttttacaaccattacaacccaatcgacttctccttttagcaacaggtgtggatttcttcatagtagatataattgcagttacagagacactatctatcgcatactacacactgttgtccaaagaagtgttgatcaattgataaaagataacaaattcatgacatgtatatagcaaatcagagggttaaaaaataggacttccgacgggtgcaccgatgtcataatttaaggtataattgttaactctgtgattgattattaaggcttattacagtctcttcttatatgtacaggacaatgacagatagagagacagatacagccggtgcatcaccatcagaacaactgctagaggcggcacgtcgaaacaatgttgaccttttacatgaattattaaacaaatatcaggataaacctaatgaggcaattgaattaattaattcagcagttgatgcagcaggtaatggtgcattacatttatctgctaaatatgggaattatgaagtaatggatcaattattagatttagatggtgttaatgttaatataagaagtaaaatgaatggtaatacaccattacattatgcagttttatattcatttgaagatcaagaattttcattatttttagttaatgaattaattaattgtggagctgattgttctatcaaaaataatgataatttaaaacctattgatataattggtgattcaaatccggaaattaaggaagctttagaatctgctcaatatgcatctgttatggattcaaatatagatgaaattcccgatggtgatgatgatgaagcaagtgatgatgatgatgatgaagatgtgtgatttatatgggtattattattattattattataatcactggaagggatatagatttctaagtttagaagcatttaaagaacacacaacacacaacgcacaatgattatttcaaaagtttagcatgtagtagtgtatttatagtattatcattactttatagcacttatactagtattaaagaacaaacaaattaacagtaaagtcctaacaatagttataataagacccgctaataattagagaaattgcctaatcgggtaacgcggtaaatttgactcattttcaaaatttccaattttttcaaattttttcactttttttaataaaattgataactgattggccatttggttggttgttggttgttcagtgtttttttcctctacttgtttgttccttttttctttatttctctcttttttttctttttctttactcttcttctttcttacttatcttcttttagtatcatagattaatatgccattagttaacctgttgaatactgtgaaaacagcaactgtttataataacaagaaattttttgcattagttgcatgcaatccaattttaagaactaatgtttcaaaatctattaataataaaccttttacctcatcatttaaaagaaattattcaactagatcaacagttattcaattattaaataatattggatcaaaacgtgaagttcaacaatatttaaaatattttacatcagtttcacaacaacaatttgctgttattaaagttggtggtgcaattattacacaacaattaccacaattagcatcatgtttagcatttttatatcatttaggtctttatccaattgttttacatggtacaggaccacaaattaatgaaattttagaaaatgaaggtattgaacctgattatattgatggaattagaattactgatgagaaaacaatgggagttgttagaaaatgtttccttgaacaaaatttaaaattagttacagcattggagaaaatgggtgttaaggcaagaccaattactggaggtgttttcaatgcagaatttttagataaggataaatataaattagttggacaaattaattcaattaataaagaaccaattgaagcatctataaaggcaggtgcattaccaattttaacttcattagcagaaaattcatcaggacaattattaaatgttaatgcagatattgcagctggtatgattgcaagagaatttaaaccattaaaaattgtttatttaaatgaaaaaggtggtattattaatggtaatacaaataataaaattagtgttattaatttagatgaagaatatgaaaatttattaaaagaatcatgggttaaatatggtacaaaattaaagattaaagaaattcgtgatttattaattcatttaccacgttcatcatcagttgcaattattaatgttgatgatttacaaaaggaacttttcactgattcaggtgcaggtacattaattcgtcgtggttataaattaacaagttatgatgatttaaataaaattaatttaactttattaaagaaaaatttaattaatgaagttaatgacgttgatgaatatttatcaaatttaaaacctggtaatttccgtatttatgcagatgaaccaatggaagttttagcaattgttaaaaaatcagatgatgataatattgcaaaattagataaattaattgtttcaaaatctggttggttaaataatgtaactgataatatttttaaattattagaaagagattttccaaatctttattggattgtttcagaaactgatgataatatgtcatggcattttactaaatctcaaggttcatatactaaacctggtgaagttttattttggtatggtataaatgatttaaataaggcaagtgaattaattaataaatttgttggctctaataaagtcaatgaaagtaaggtaagtaatgttttctctaacaaaacacaaactagatcattccattcaactagattagttaatgataagaaaaaagttgcacttattggagctcgtggatatacaggacaaaatttaatttcattaattgataatcatagtgaattagaattatcatatgtatcatcacgtgaattagcaggtagtgaattaaaaggatataataaggaaaaaattatttatagtaatttaaattttgaagatattaaaaatattgaaaaaaatggtgaaattgatatgtgggttatggcattaccaaataaagtttgtaaaccatttgttgaatcaattgaagaagtttctacaaagggtaaaataattgatttaggagctgattatagatttgataaaagtggtaaatggacatatggattacctgaattaaagggtagagaaggtattaagattgccgataagatatctaatcctggatgttatgcaacatgtgcacaattaacaattgcaccaattaaggaatatattaataaaatgagtaaaccaaatatttttggagttagtggatattcaggtgcaggtacaaaaccatcaccaaagaatgatattaattttttaaaggataatatgattccatattcattaactgatcatattcatgaaagagagattggatttcatattggtaatccagttggttttatgccacatgttggatcatggtttcaaggtattgcaatgacagttaatataccattagttgaaaatcatggattaacaaatgaaaaagttaatgaaatttataatgaatattataaaggtgaaaagttggttaaaataattggtaatgaaataccattagttcatgatattagtggtaaacatggatgtttaattggaggatttaaaattagtgaagaaggtgatagattagttattgttggagttattgataatttattaaaaggtgcaagtacacaatgtttacaaaatattaatcttgcacttggatataatgaatttgaaggtataccatcattttaattgtatattttatataaagtgaagtagagtatagtatagtaagagatatataatttttcagttaattacgtgaaatttaatttttcatttcatttcatcgctttaagttgatttagtatttataattataattatcttccttttgcaagagaatgttatacagaatagggaatcctatgcagggtattcgacatgttatgagagtgaatcagttactcttctgtaggagggttcatgatgataaattgtcattgttgaagagtatactgaataatcctcaaagtggtaaagaggaagttaaggatagagttaagtatagtggggataataatagggataataaatatcgtaataaaagagatgatagagatagaaatagagacgatagagatagaagtgggtataagaagagagaagggtatgttaaaagagaaggtaataatactaaatatggtaataaatatggtaataaaaagtattcaaggaatgataaatatgataaacagcaagaagttcttaaggatgaagaaacgttattaaaagaaaagcgtattaaggaaatacaaacagttttcaatacaggtaatgatagagataaggaagcagctaagagaattattaaggaagtacttgaaagtaataagaaaggtattgttcaaattattcgagaaggaggtaaagttgaatattgtcatatttatgattcatttggaggtatgaaattaaatgagaaaggttttctgattgttggtaatagaaatgttaaaggtaggggagaaaatgatgagaatattgataaatttggtttagaggaaggtgagaaagtaattatattaaaagttagtgatagagaacaagttattaagcaatatggggattatttgaatggaaaagtagttgagatattgaaacagagtaatagtaagattatagagaaacaaactagaggtaaggagaaagagagtatgggaaatggattaggtagtaaacttgtacaaattggatggaatataagtagtaatgatttaatgggacaaaagagatttgaaattgagagtcatttaaggagaggagatgatattgatattgtaattgatgatagagaggtattagataaggataatcaatttggtaataatggtaatgatagtaaacaatttgataatattgaagaaaagatggtaatttataggaatagacgtaaagatataaatgaagttgagagattaaggagaaagaaggttattagtaaattaaaggagatgttaagtagtgttgaagggttattagagagtaatgttggagaggagagaggatatttagagagtcgaatagttatgagggttaaaggtattaaaatgaagagaggtaaagaagataagaaggataagaaagagcagagacagatggagagacagaggaaggccgagaggaatgcacagagaagactggagaagttgaaacaacagcaggagaagttaaaagagattgtcttgtaatatagtcataataataataatactaaatacatgtaaatacttacgtaatacaataataataagcgatatatccgtagacgcgaccattccttttattccccatttaaaggtctagttacccactcttattattaattagagttattactattagttgataatttttcacttatttcctaagggaagtaccttatatgcttctttttctattggatatcttatctttactgtatccaatacacaactatcatgtcacaaactttagagatagattatgaggcattacccgataattcacctctaatgtcacaattaattgcaggtgcctttgcaggtataatggaacatacaattatgtatccaattgattcaattaaaactagaatgcaaactctaaagattaattcaaatgatggtataatatcatcatttaataaaattagtgccaaagaaggtcctttcgccctttggcgtggtgtttcttctgttatattaggtgcaggtcccgctcatgctatttattatatggttttcgaatcaactaaaactactctttgtaataatctattaaatcataatcataataataatgatggaaatactaatattgcaaatattaataatattaataatatatctaattttattgttacaaatgaaaaacatccattaattgcaagtttaagtggtgttgctgcaactataacatcagatgctttaatgactccatttgatgttataaagcaaagaattcaaaataacaataataatatacaaaatttaaaatctatcatgaaaacttcaaaatttatttatcaaaatgaaggtttaaaagctttctttataagttatccaacaactttaattttaagtataccatttgctgcattaaattttggtatttatgaattttcaagtgataaattaaatccaaatcaattatataatccaattatacattgtatatcaggtggtatatcaggtgcttttgctgctgctgttacaactcctttagattgtattaaaactattttacaaactaaaagtttaccaaattcaaatagtttattaactgcaactaatgcattatataatcaaggtggtatatgggctttctttagaggtttaaaaccaagagttgtctttaatgtacctgcaactgcaattagttggactgcttatgaaatggcaaaagcttatttactgtaattttaatcttatattatacaactttcctactaatcttactcttactctctctcttttacacttgttaaatagattatatatatagatcatttattttatataataccaatcatacactttttatacaacttttgttgcaataaatgaaaatacaacactaattgttataaatcctataaaattaaagaatgctaatcttgaataagatctctcctcctcttcagttctaaatgatgcaaatatattcctcagactttgaaacatgttcatattgatacttcactatacggaataccggtatatagaaaggaaagaagagaagttgtataaattaaacaaatttcgctctttctttaaatgaccgcttttcatctactcttcccttctctttcttatctctttttatcaaagttcttttacaatgaaggaaggtgcattacacagagaatggagtctctggaatcaattgaaattgaataaattgaataaattgagtaattcaaatgttactgatgataataacattaatgatactaccccggtcatctccgataccaataatgatattaaatatgattcaccttattcttatgatgaaaagaaatcttcatctcttatcaaaaataagacattcaaaactattagatggttgactgttttcttaattcttttttggtctatccgtaatttaatttcataccctttcaaagattcaactccatgtcatggtaacaatgcaaaagataacaaattaaccttttcaatgaaaaattatcaatcaattccaatgaatttccaatcacaatcacaattacaatcattgaaaaatgtctcatcccctcatgaagtaattgatattccattttctccttatacaaataattcattacctgtttattctcatcaacttttaaatcattcttttggtctctcttggaataaaccaatcttagttaaatattctccacctccttcaaatattacttataatagagttatctttactttagatactttaattgatggtgttcaatatgatagattaattcatatttatttaaataataatgaaatttggagatcttcaacaattgaaccaagtggtaaattatctcattcttatactgaaaaggatatgactatgtattctaaattattccaatcagaaggtgatttattaattcaattagataatataattaccccaaaattaacaggtaaatttaatataactatttctgcattatattttaatgaaattgaacatccaattaaaaatatctcaggtggtaggaaaaatagaactttagctgaccatcctgatttaattcctttaactcctaataaatatggtgtacaatatccacctatttcatattatcctgattcaaaattatcaatttcattacctgaaattaatcttaatacaactcaattaatggttcttttaacaacttcaggtaatgcagcagaagaattttggtattctaatttaatggatcaatataaagattcattccttgcaaataatcgtcatttttatggtcatggttcttgtagaattattaatgttttcattaatggtattagagttcattcaacaattccaaaaccttatattttcacaggtggtattgcaccaactttatggaattcaattgtttcaactggtagttttaatataatgccatatcatatcgatttaacttcaattataccattattatgggattcatcagctgaattagaaattgaaatttcaaattgtttagatgatgatgataaaactattgttaaatcaagtattggttcaaattggattacttctgcttcattagcaatttgggaagatgaaaatattgataattcatttggtgatttaaatattttcgataattcaactgaaattaaatcatttgcaattaatccaccatttacaggatttttaactcaaattattaaggctaattataataatattttacaaagtaatataactcatgtttataaaaatggttcagaaattagtaatttaagaaattatgaaaatcattcaaatgaaacttcagttattataattaataaatttggtgataatcaatcattaatatttgcatcaaaatcaaatacaacaattaatgaaattgatccattttctgaagatatccttaaagattttacaatgttaactaattcagcattagcaacttcattaaaattcactccaccagatgatgaagatacaatggttgatcctgatgatatttcatttagtactaatgtatcacttagaattgaatctggtgcttatgaacattttataccattagttgaaattaaatcaaaggaaaatggtactgctgattttacaatttctaaaaatggtaattatggtacaggttctatgttacataattatacattatcagatattagtggattaaaatataatagaattgcattagctgaaaatgatacaattgtttatgataatattactgaatcagattcaaagtcaacaattaaaacttcaaatcatttaccttgtcatggaaataattatttattaattaatgaattaggtttaaataatgaagaatttgctgaacttgaatcaattttatcacaagatgaattaaattatcttattaaagcattaattgaaaattaattttactaattttatttaaaacattctttttttataacctttttacacttttttatactcttactttttacaattaaatttttttccatattattactaaattaaacaaaaaaaaacactatagaacctaaagaaaagcaaagataactgattgtaaacgattgaaaaaaaaagagagaatgaaaggagaattttaaattattgtgattgacgactatcttttgataattgttcattattagctgaaccattatctaaatcttttgtatacatttcaatttctttccaaaattgttgatcatcctttgaatttgcagtatttataccattatttgaaaaatctctaataatttgcttttcaggatcattaattgtattcggtaattcactttcactaattgaatttttatgataatagtcagttggtgaactaacaaatgttttattatcttcacctgatgaactataaattggtgattgagaaattgatgttggattgctattcataattgaagaatttgcccacattgttgttaatggcaatgaaattgtaattaatgcagtaccaagagctgaaaatgcttgtgatgaatattgatcagtttctgaaaatccattaaatgaaattaaaattaaaattgttggtataaccattgtttgaaatgtcataataaataaaatatgaaataaattaaattgtgttaatccaagataacgacgtgtacgaattgcaaatgcaagttttaataataacataagacaaattgcacatgatgatgtaacaaataaaattaatggtgtattaactaatttttttggaactgtaacattattattgtaaaatgctaaatctgaataaaccatataaacaaaatataatacaaatgatgcaatacctaataaaattgaaattaaagttgcaatatatccaattcttttcaatgatttttgtggtgaatcaaatataacataaacttgataacaaaatgatgtttcaactaatccaattaaaataacataaaataaattagcaacaactgatatattacttgcatttttatcaatattttgaatacctgaaaaattatatccaattgtattataagttttaactaatgtaactgcaaataaacatgattgtaaaaataaaactccaagacatgacatattaagtataaatattggagattttttatttttagtaaccataaatgtaactggtaatgctaatgctgataatccaattctagttccaaatataatacctgtaacaacaattgtcttcatataactatcaagtaaacccattgaaatttgcatatcacccatagttggtgaagtaaaatttaataaaatttcttctggattatcaagtaattcagatgttggaaaataatcttgtatattagacattgtttgaaattattattccttttttgattaatgaatgaaaagctaatgtaatttatttgaagaattcaagattttgtggaaaaaaactagaaatataccatctttattgcttatattgaattaattgaatggaaatctttttcatttaaacgttttcaaaagaaaagaatcattacaataattatcagtttcatgtatgaaaaaaaagtttgaaaatgttgcatatcaataaaatttcctttttaagacatgtcaatgtattttttcataacatttttttcaaacttgatcgataagaaaattttcttccccttgattaaatttcataatcattagtaaatgatttccattcattaattctcacaatatgtctcatcgttggtctaccatgtggacaattccagggtttatctaaagttgctaaatttttaacaattttttccattttcggtctatttaaagattgtccaatcataatacttgatctacaagctctcattgcaaacattgaacgtactttactaggtctaggaaatgttgtaaatgcaccatcttgttcaccaactaattgaataagttcatctaaatctttattattgaaaattgtatttttagaatatggtaaggaaactaaatgaatttcttcttgatgtgcgtcatcagatgtgttatctccattatcaggagatttagttttaaatttgaaaccatttttttcgaaaatgtttaaattatttaaaattgtaaatttatcaattggtgtaatatctaatttttgtgacataactaatggttgattttcaaattgagtttcagatattaatctctcaaaattaaacttttcatcagatgcatgttgatcaacaataagtatatcaccagtattttcctttaaaactatgataaaacctttattaaattgtccaataatttttaattgtaaaaaatcatttttattaattgataaacctaataatgtttctgataattccttatccataaaatctgatttttcaactgaattatcctttgatgtgacattatcttcagtacgtctccttttagatatagggaatttcaaatcattcgtatgaattctaacttttttagaattttctgagggaatgaaattgatatgattatcagctatctgtgatgatgtatcaatttgttcttcttcaaaaattggaaggtcatcatacacaacttcatcttcaagttcaggaacaaataatgattccttttcaatttctggcacaaataaggactcatcttcatcatcattctcatgagaatgtgaacaacaagaatgaggactatgctcttttgtttccatattaatatctgcattttgttctggcaaagaatcgtcatttttcatactgccatccctagtatcatttctcacataatgatttacaataattgaacttctatcatcagtaaaattatcagttgaatcaatattactatcaatattctgactatcttttaacactgcagtatcgttaatactttcatcatcaacaatatcatcaaccaaaatttgagaagtttcaataactcttgaatttctaattgatgctctttcaacaacatcaatttcaaaatcatcttcaatttcaacattaacatctgtatcaatattattttgtgatgaattatcttgaactaatgcaaatgaacttaatatttgttgagaatatttattaattctttgagaatcatcaacttgatgtgaattaaatggtaaactataagtaccaccattataccaaaaatcttccaagaatataacaattttttcaaaaagtaatttttcaaatttatttgaaagtaaaatagttctcttatcaggagttacattaatatctaataaattttcatttatttggaaattaagcataacgacaggattctgtaaataattcatctttttatatgtttcatttattaattttaataattttttatattcaacaggtctattatttatgaatataaattgtctatcctttgtcaaacgaccatcaccaaaagatgcttttgatatcataccattcattttaaccatataatcattatttaattcaagtgatttttcaatttctgttaaaccatctaatcctgacgacccataaacattaattatattatctttaatttttttattaccacttgttttcaaaacaacttttttcttacctgatatatcaatattagtaactaatattctaacattagttaaaataattaaataagatattaacatatcaatacatttttgaaattctttcctatacattttttcaaaattaagtttccttacaggtaagtctttgaaaatttcagtaattttaacacaggtacccttactttgattaaccatttttttatttaacaattcaccactttttttaaatgttaattcccaaccctttggtgcttcagttgcaatcgaagtcgttatgactatatcactaatattacaaattgaattcaatgcttcgcctctaaatcccaaagttttaacactaattaaattttcaaatttctctaatttggacgtataattcttcaggcaaatattattaaaatcttcattacttataccatcaccattatctaaaatttcaataccttcaagtccatattttttaaaagtaattgaaataactgtggaatttgcatcaattgaattttctaataattctttaacaagacttttaatttcagttatgacttgtcccgatgtaatgttatgtacatcatcggtcgatatacgattcatcttcattgcctaaaagaaaatgaaatagtataattattaaaataaaaaaattacgcgtaatataattctacaacatgaaaattccaacgtgttttaatttatcaccaacttttttttcttgtgtttcttttaaaatatataatggcagataatctaacacccagtgagttaattgatgcaataacttcctttttacgagtgattattgaacaattatggtatcaaattgaagtttatccaagagaatcatttgaatcatgtattttttatgatttagaagttaaaacaacaagacatccattagttaaggcatatcttgatgaatttattaatagtattacaaatttatttaattatggaatcataagtaagatttatttagaaatatttgagaataatagtttaaaatattcatttggtataagtttcaataattcattaattttggatcaattaaggaatgattcacaatttttaaaatctgataaattaaatgatttgtttaatacttttaccatagttaatgaactgaaaagtttattatattcagttattgttgaatcttctaaattatctaaaattgaacaaaattttggagattttaaattattattagcaactactgaagatgaaatggtttcaagaaatcaaaattggatattggataaaagattgaaacaacaaacagccgatgatgaaagtacacttaatgatgtagatttatatccattgaaagaagttcatttggaatacatcaatattcaaggatacattgtatcatataagtaatagaatagaaaaataataatacagtgaaatatttttataaatacaatatacaggagcttaaatttagtatcaacttattttagatatattcttacttattagattagccttatccataccaccaatactccaatcttgaacaattaatataataaaccaaacacatagcaaattgaataaattatgcaagaaatataaatgtcttgtaccaaacaatagtgaataaatcataaaatataaaagaacaagctgtgttacaattatattaaactcagtctttggtcttggaatcatatacccttgatttaataattgaataagtataactattggtaaaattgctaatatattatgatgtgatgaaaatggtgtaatccatctaatcgatatatcatgaatccaaacaattaaaacaggtacatgaattgcaactaaccaaaacattaacatcatcaatgaaaatttgaaatttttgaagttctctgttaatatcaataatttttcctttgttataaccttatcttcatttatatcatcatcactattactattagaatctgaacttttttcctttgaatgtgtataatttttaaatacacttgtagaataagcatttaaatttggattggaaataaatgaatttaacgttgaaaaaacttgggttaaaacacaaacaataaatgcaaattgataaggtaaataaattaaaacaagcaaaattaatgaaataacactaatagttttcctttgctttgaaaaatttttaaattttggtaatttgactgatttccaaattgaaagttttgataattggagtagtaatattaaaactaataatattaaattgtaaagtaaaaaatttaatccaattgaaatatataaaataaaagttccataaaaccataatgaaatttcttcaattcccataaaaatattattaacttcaactttacttttctctatattactcatcaaatctaaatgattaatctctaatggattaaatatttcaataaatttaccaaaacttaatttggttgatgttaaaaatgataataatgaaaaaataattgataaaattgtaattgttttcaaactacaaatatataacattgtttcaccatatgaaggatatttattatattttgtatattgaataaattgacataaaataattaataatgtaaaaaataatgggaatccaataattgataatctatatttaacaactaataagcttaaacttttaaaccaatcaactgtaacataaatatccattatttcgtcagatgataatgaatcagtaaaaattttgaattttgaacttgaatttaaatcattaacaataaatggtgtatacggagaatttgaattgaccattgaagttatatgtttatttgaatcgatgtcaatatgccatttaacttcacctttaacagattgacttataattggagaaaacttttcattgattgatttcttatatctaatatctaatctataagctaacagacttgatctaattgaaggtatatcaatatcaattataattggtctatgaacaggtattgttatatcattaccttgactaattaatttccacaaacttgaatcacctgcctttagtttactcaaactttctaactgtaaatcagctaatacaaaatcatcatcactcattatatcagatacatcctcagactctatcataattacattattgaaagaatttaatatatttgaaggtaattctaatgaataataaactttattatcagtataagataatggaataatgtatgtatatttattaatatcaatgcattctaattcagcaaatttcattgtatcatcagttgtataatcatatatttttttataataatttttatctctaatatcttcattaagaactgatctacataataaaattgaagttgaagttgaatcatctaaatcttctattgaagttggttttaatgaacttataaaattaaatttatagttatcatcttttggaatattaaataaattaattggagggaatgaatttaaatctctctttatatgattttttggtagttgaaaaaatctttgattggttgaatctttcaattgctttaaatcaattttcaatttataaggtatatttaaacctagttgagtatctgaaattatatttgatgatttggttaaattaggtaataaaattgatttaaaaatttccattctcttatttaatggataagtttgagattttgagtttttatcaacaattgataataaagttttagataaaactttccttaattgatcacaccaaacaattgccaaatgatcaattggagtccaaacttcaggtataccagttgttgaaactgagaatccatgatttgaaggaactaaaccagttagtgttgtataatcagttggcaaagttgtatctaacataccaccagttattgaaattaatgatacattagataatctttttcttgcaattttatttaattttaaaattttattatgcttgttatgtttgttatgtttcttactaattttattatgaatattcatatcaatattttcaatttcatcatcatcattttcatatgcaaaacctttcatccaaaattcatcagttaatttgaaaacatttaataaatctgtttcaaaagtagttggagcggcattatgaggagttgataaagttataatcgtattaattgaatcttctaaataatttggtaaacttaacataactctagcaactataccacccattgaatgacttaaaataattactgaagttggataattatcatttgaattatcatttgatttatacaatgataaaatgaatttaactgcttcatttaaatattcagattgatctaacattgttctaccatggaaagcggtaaaatcttcattaaaatctgcagtgaagaaatccaaattattagtatttggatttaataatttaatattattaatattatcaaaatattgatcagcagtttcagctgcaattgatctaacttgtttataactacctgcattaccaggtataaataatactggagtaccagttaaattgaaattttcatttttaccaggcattttatccttcccctgttctctataaagatataatgaatattttgaagcaaatcttgtatatgatgaatcaaatgcacgtattttagcgtaagcagggttcatatagacacctttacaataaggtgaatcagcacctgaaaatgggattgtaaagctaaatgcaattaataacattgtgaataaaccaattaaggaagttgttaataaaactgttttatttgatacataatttgtattattattaatattgttattttttgattttgagttatatttttcaggtattgagaacatgatgatttattttaatgtatgataaaaatgtcaatatggattgtgtataaagttgaaaaatgaaattaaatatgtaagaataaatgaataaataaaatgtttatagtgaatatgaattaaaagataaaataaaataaaataatgaattaaattaaattaaaaagaattgaaaaatacaagaacaatatgaatagtagataatgtaaatgagtgaatatagtgagaaatgtaactatatcagttgataattggtatatgatatgatatgatatgatatgatttgatatgataagatatgatatgctatgatacaaataccaacagaaacagcacaaggtaagagagataataatcaatccaatactgttttagtgtagtataagcaggtgtattatgataatacaattgccaaatgaaagcaaatgaaagcaaatgaaaggcaaaagaagaacactgaaaagccttaagagccttcaaattccttcaaaagtaatgaaaattgaaaattgcccttttttcattcattcatcaccttattaaaataaatttgagattttaatattaaaaaatagatgagccacataatatttcatcgacgcaccgacccgcctttttttccaaattacccggcatttttcctattttttttaaatttttcagtagagactacatgaatggacgttgaattggttagatattagatattagatattagatattagatattagatctggtgtattcttattttaataggcaatcccatcttcattatatagacatacatcaattatgacaaggagagctcaaaacctcaattctttagttcgtggaagaattagatcttctatgaataaatataatttatttaatttatataaaaagaataaaccaaattttaaaattatgactttatatcaacaaaaatgggctgcaaagcaagaaactagaggttatcatggtgaacatattagagaagagagatggcaatcactttttgaaaaaaaattagaaggtgttgctcaattagatgcttcactaaagggtaatgttccttcaactccaatggttttacaaacttttgcttcattagagaaaagattagattatgcagttttcagatctttatttgcttcatctgttagacaatctaaaaaattcattcttaatggtcatgttaaagttaatggtgttataattaaacatcctggattcactttaaatcctggtgatatattctctgttgatcctgaaagagttttagaagctttaggtgctaaaaaacctgcattaaaggaagcttataaagttgataaattacaagttattaattggcaaaaatatgtaaaatcagttcaagaaaatccaagaaaagcttgggaaaagaaaatggaaaaatcaaataaaattaattctctttataaagattataatgttgaaggtgttttaaagaaaaatgaatctgattttgatcaaagaaaaaccgataatcaaaatgttaaacttactaaaatgaaagaaattcaaaattcaattaatagaaaatcaattcttagagatataataaagacaataccatttgattcaactgaaaaagtagaaaattctgaaccttttaaaaaacaatttggtgataaattatcactaaaggcattccaaatttatcaaagcttaccaacaaagataactaaattacaattagataaagatattaatgaggaaataaataaatttgtaccaacttttaaagatggtcaaccaatcggtgaagtttatgaagatactaattctaaaaaaattagatctcaattatctgaacttcattctgaatatttagaaaaaattagagttgattttgctggaaaacctttagcaactgatgaattaattaaaatatggagtgaaaatatcaagagacatccagttttacctccatttagtgaagttgaagaaaaaggttcatattatttaagtttaccatggcaaaaaggtatgtatggtttacttgatccttcaaaatcttattttactccttggaaaccaagacaattcttaccagttttctcaattttaccaaaacatatagaaatttcattttcaacttgtcatgctgtttatcttagagatcctgttgcaagacctggtgaatctgaagttatctctccttacgatgaagatattcatgaaagatcttacatgtattacattaaaaatggtatgtaatctatgtatgtaaaatttaatataaattctgtatataatgaaaagaaaagaaaagaaaaaaatataaaattcttaaaacccacttcacttcgcataaaagtttcattgatcccaaacacttctttttacttcttcatgtcaaaatcatctcttatcagcttattaactaaatctttttctaaagaacaagcaattagagaattacaatggattaaaaatgaattaccggaaaataagtggttaaatgcgtgtaatttaagatcaaatcatgttccattacaatatattttaggaaatcaaccatttggtaaattagatcttatatgtagagaaggtgtattaattccaagattagatactgaagattgggttattgaatcatctaaagtattgaaagatgttaaaattaatggagtattggattattgtacaggttcaggttgtattggtttaagttatgcatctgaattaaatcaagtatcgattgttgattgtgttgattttaaggatgatgcaataatattaacaaatgataattataaaagaaataaagatagtattttatgtgatgttagaatcagtaaaggtgatctatttaatggttatataccgaatgatcaaatctacaatacccacactaacaataatttattagtttcaaatccaccttatataccattaaaggatcttcatactgatgaagttgaagaaagtgttcttaaatatgaaccaagagaggccctattaggagatttagaattttatgaagcattatgtgaaaatattcttttaaaaaacaactcatttaatggatttatttttgaactgggatatatttcacaagtcattaaagtaagagaacttttaaatccaaaaatctggtcaattggtataagaaatgatagtaatggtaaattaagaaatgtgataggttggaaaaaacaatcaagttttaatgtattacaaaaaattgtacataagaaaattctataataatatttcaaatctaactagattcaacatcaggcgttattgtttcagctgcaatttcagcaattggagttgattcactatcatcatttacggttgttttagcaattttcctctttttactacctctaccaactgcaacaacattttcaatagggaaaactttaataccagttaaaataaatccaccatcacttcttgatgtcattaatggatgaattctaccaggaattgtttgatattttctaacaactgtatgatgaatatttggtaataatatattcttttgtcttaaaaacatatgatttaattcaattaacatttccttaaattgattatatataattaatggtgatgaaccacgtaaccttggtaatatttttggtacaaatgttgcactatttaatgttgatgcatagattaaactttcaaaatcattttgtaaaactctatcaattacactattaacaatttcagttctttttactttcctttgataatgaactttcattgcatctgataattttgaatattcttcatcagttaattccttaataactggtctctcctgttctggatataaaaattgtaagacattaatacattgaaccatacttgttgggcttgttgctatttcatttgcatatcttgtcttatttaacagatgtatactaggattatcattttcatgtattaatgtaatagtacctctattacccattttctctaacattgcataaactattaaacctccagtttcatccaatactaaataattaccacccggcataacattacctaaactcatcattaaaccaattgtttcaatacttaaattcatgattttaaaaggttccttttcatgatataaatattcaagcatttcatttgatgttaaataattaatttggaaacgacgtaaaaatttcttatgtttacgatcaagatatttctcttgtgaaaatgctgtctttttgtcaaatgatgaatgatttttaatcattgattgaataatttcttttgcaatttcattaccaccaactttattcttcatttcttcaatttcttcaactgttaatttttgaacatttgcttcatcaactaataatctattatcactacttgatcgatttgataattcttcattatctaaatctgttaaatctgttaatccatcttccaaactcttgattggaattaaattattattttcattaccaatttcaaatgcttgtccatatggatatcctaatacatcaattatattgaaattaccaaatttacccatattaattacaccatctgaacgtaattgtattaattttcttgaaccggatggtaaaaccaatattgcccattcatcctctgttatatttgtattcggtctataatccttcatccccgtgtcctgttagttcgatctcttaacctactgtatacttttattatgaaaaaaaattattttaaattacccaaaacgtcagcactgaaaaatattttttttttctttctgcatgaaaaattttatcaatttctattatcactatagttattgtaggaaccttttatcattacatcctttctgttacaacactatacacgacaatgggtaaaagagctagagagaagcaaggtgttccaccttcatatgaagaatttcaagcggcaaagcaacgtaaggaagacaaaaagtctaagaaagattctaaatctaaatcaactgaaactgaaactaaaaattcaaataagaaacaaaaattcgataataaaaaggatcaaaagaaggaaaagaatggtaagaaatctaggaagagtaattctgaagatttagatattactgaagctccaaaagatttaccagaagttaattatgaagaattatcagctgcaagaaaatcacttttcgatgatgaatctgatgatgaagaagaaaacccaactagaccagaagatgaatttgaaacccttgatgatttagatgatgaatttgaaacccttgatgatttagatgatgaatttgatattgaagatgaagctgatgaaaatgatttacatgaaaagccaatgttctcagatgatgaatcagatgatgaaattgaaaaagttaatgctgctaatatggaagaatattctaaacaacttgatatggaaagagaacaagaagaattagaagcagaagaggaattattaggtgtaaatcaagttcaacctcgtgctaaaattttaccaccgccaggtgaacaagatcctgcaagtgaaactaaggatggtgcaaaagatttaacatttattagaactagaatgttagaaattgttaaagttttagaaaattttaaagatttagcagaagagggacgcaatcgtagtgaatatattgatcaattaatcagtgatatatgtgattattttggatatacaccatttttagctgaaaaattatttaatttattttcaccaagtgaagcaattgaattttttgaagcaaatgaaattcatcgtccaattactattcgtacaaatacacttttaacaacaagaagaaatttagctcaagcattagttaatagaggtgtcaatttacaaccaattggtccatggactaaagttggtttacaagtttttgattctcaagttccaattggtgcaacacctgaatatttaagtggtcaatatattttacaagctgcatcatcatttttacctgttatggcattagatccacaagaaaatgaaagagttttagatatggcagctgcacctggtggtaaaacaacttatatatctgcaatgatgaaaaatactggttgtgtctttgcaaatgatgcaaataaggcacgtaccaaatctttaattgcaaatatacatcgtttaaattgtacaaatacaattgtttgtaattatgatgcaagagaattccctaaaattattggtggttttgatagaattttattagatgctccatgttcaggtactggtgttattggtaaagatcaaagtgttaaaactaatcgttcaccaaaagattttattgatattcctcatttacaaaaacaattattattaagtgcaattgattcagttgatcataattctaaaaatggtggtgttatcgtatattcaacttgttcagttatggttgaagaaaatgaatcagttgttgattatgctttacgtaaaagacctaatgttaaattagttgatacaggtttaacaattggtaaagatggttttacaagttttagaggtaaaaaatttgatacaagcgttaaattaactaaaagatattatccacatgtttataatgttgatggtttctttgttgctaaattccaaaaaacaggtccaagtccattcgataaatctaagattggtgcatatgagaaggaaaagatggcaagagaagaagcattaaaggaaggtttaattgctgatgattttgctaatttcgatgctgaagaagataaagaaattatgaaggaaaatattgttaagaatttagaaaagaagggtattgacccaagaaagattgatttagagaaaaaattagaaaagaaagattaaacaaagttataatttctctttgaatcaaattaattaatttatttcttttctaattaaccaccataatttatgtaaataatatagtaacattttttttatatacaattatacaattaataaatataatacgtacaaaaaagttttaagtaagttttatacaacctaatccattctctgtcatgtaactaacaccaagttcttcatattgttgtttagtccaaaaaccttttaaattattatttgaataatcattaaatgcccatttagacatacctctccaagcatctaatattggatcatttgcaattctaacattaaaaggtctatcagatggtaaaccagtacgaaattcattaattaaacgttctttaaaatttgggaataatgctgatccaccagttaagaaaatattatcataaactttagcaattttttcattgtaagaattatcacctgaaaatcctaattcttgaggtaatcttcttaataatgtatcctctgcaatttctacaataccagcttgatcaatacctgaaattgaaggttgaaacataatttctggaattctaattctttcaacatttaaatggatttgatgtaattgatgttgatcttcattatcaaaatctcttggacctcttaaaaatttatgaattgttgaagttttataatcaaattgacgttcctgtgtatcatccattgtaaaatttggatcaaattctaataattgcttttcaagtgtataaatttcctctaattcctcagctgaaatttcttcatcatcaatacctgcaatatctctataaactgcccaatcatcatcatttgcaccaaaagtatcatttggatcattatcaacagttgcaggtttattattatgacgtcgtttacgacctcttctatcttcattatcagatgattgaactggcgcatcatcagctaatgatgcaatatttttcattctcatttgtgatgctttagatttacgatcatttaaatcatcctttaatttgattctatccttacgctttttaacaactttttcaagtctttcacgttttgatttgatccagttttctaaatcatcttctctaaacttaatatctttcagtctcaattcttcagcttcacgaattgcttcctctttttcttgtctagcacgtaattttgaatcaatatttgccttaattaatcttaacctacgtttctctctctgttgttcagttgttaattcggaattaggtacatctaatattgagaaatcatatttatttgcgtcctcatcttcatcattatcattgtcagtatcatttagtaattttgccttttttaaagatttttccaatgtttctaaatatttatctaaatcatcttcatcatcgaatcctgcctcacgaatagtttcaataatttcctttttacttaattcactaaaactttcctttattttactataatattcaaaatctttttgctttaattctaatttttcaattcttttcaatttagcttgatcttgtaattttttaatattttcctttcttttaatttcgtctaatctaatttgttcctctgttttttcctctttaataatttcattaaatggtgcctcaattgttatatcatgagtttcaagataatccatatctaaagttttttcaatttccttactgaaatcttttgaaacataacaatgatctttaactaattgttggatttgccaatcatttaatcttgttgggaaataaggatatttaagacctaatgaacttctcatataatcacataattgatgaccgccaatattaattctctttgaaatattatgtagtggcattgaatctaatacaggtataacataatttgattcatgatttgtacctaggattaaacctgatttataaccattttcataaaaactgaaaacagaatcaataccaaaagcaattgatggtatatcataagattcgaataacatttgagaaattgtctctctttgagataatggagctgctaatgattcattcattataattggattattaactctattatttgaattaacacctagatgtaaaaatgaaaaatcaaatattttctctattgaatcccaatttgttaacatttgaccatcaaatggtgatttcatatttgccttaacagttgattcaaggaaaacgtcattacctacaaatgttgtttgtttattatttttcctatctctatatcttgcagttaatgttggataattaagaaatggatctcttgtgcctgccataccaactctaacattagttttacctaaatcaattgcaattggcacattttgttgataatttgaattttcagtatcgaaaggtaataaaccttcaggttgaggataatctggtaatggataaactttccttggtggcaagttttcatctcttttagcaaagttatgagagaagttattctctgtcatagatgggttgatatgtgttgtactaggagtatattcacagataaaagagtatattatacctctaaattcactctataaaagtcaattcaccaattgctatgtaaatttccagtgtcgctaattgaataccctgacatgacactttgccacctttttaccactgctgttcttgtgttttgattagttgcttctactgattataaggcattaagatatcaattgacactgcaatgtctgaaaataacaacttctctattcaaggttttaaccttgtcactcttttaaaacgtttagaggctgcaacttcacgtcttgaggatgttactgtttatcatgagcaaaatgttgcaacaatggcataccctaatggtaatagttcaccaattacacaatctacagatgctgcacctgcaattacttctgcgcctgttactgcaccagtttcaactccttcaccaatagttgatgaattaccaaaatctattaaagaatttgatttatttattgatgaaaagatcaatacatacgttgaacaatcaaataaaattgattcaattttaggtgaacaagcagaagttttcaaaaatgcaattttgaaggaaagaaatttattattagctgccagtaaatcaaagaaaattgcattagatgatattaatttccaaaattcagttattatgccaattaacgaattaattatgaaagttattcaaattaaggatgataatagaagttctaaaaattttaattatcttaatgcagttgcagagggtgttgcagttttaggttggattgttacaagtacacctgtttcatatattccagattttaaagattctgcacaattttggactaatagagttttaaaggataataaaggtactgataatgaagaaaatgcaacaaattgggttaaaagttttttaactatttttgatgatttgaagaattacgttaaggaatatcaaactacaggtattgcatttaacggttcagaagattttgaaactgcttttaaatcagttaattcaactgaatcatcaactccaatatctacaagttcagttagtagtggtggtgcaccaccacccccacctccaccacctcctccaccagctgatttattcgcagaagaaaaagctaataatgcggcagcggcatcatcatcatcaacttcaacatccggtatgggggcagtttttgctgaattaaataagggagaatcaattactagtggattaaagaaagttgataaatcagaaatgacacataagaatccagaattaagaaagaaatctgttccaatgccaccaaagaaaccaaagaatttaagcagtggtaattcaaaggaggatgttaatgttgatgttaaaactaagaagacaccacaaaatgaattagttgataataaatggatgattactaatgtaactaaacaagatattactgataataataatggtatgattataattgaaggtgagatggatcaaagtgtttatattggtaattgtgaaggtattgttgttcaaattaagggtaaagttaatgcaattagtgttaatatatgtaataaagttggaattgttattgaaaaggcaatttcaagtgttgaattaactaagagtaataaatgtgaaattcaagttattgataatgtaccaattattaatgttgatcaatgtgagagtactaatatttatttaagtgaaagtgcaattaatgttgaattatatagtagttgttgtaccgcattaaatgttaatgtacctgataaaactaatgaagatggtgacttaaaggaattagcaattagtgaacaatttgttactagatttaccaatgatggacgtcaaaccactgaacctgttcatcatggatgatatgatatatgatatatatgatatagttatttacacttactctccatgtttattgtgtagacaaaagccaaagaattattaccttttgtgagaagtcgaacagaggactttactcactttattagattacgtaacacatagtaaaatttaatttaataactttatcccgggaaagtcggagtgcggtgtcggacccggtgatttgcattttgggtgaattattggggaaaatttccagtgtatgagagtgtatgtagatagggatgtgcagatagatagtagatacacacagtgtagagtatgggtcagcactgatgataacaaagagaataactaaggataacaactcggaatgtccttccctatacagtaaaattaaattaatttaatttaattactatttgaaagggcgacgttaatttttttttatggagaagtactcgatgttgatattaatttgattttataggttgttggggtataacctctacttctctttttttcttttggtatcttactctataatcaataaccacaatgcttagatcatccgcaagatcctctgttaaaacctctttaaaatctgtttctccaaaatgtatgattagagttgctgctccttcaattaaggtaaattcagtatctgcaaaaattcaatcaattgcatctccaattgcattccaatctttaagatcattttcatcttcctcatttgttaatgctcctcaagttattaaagtgcccgaaatggcagaatcaattactgaaggtactttaactgctttctcaaaagaagttggtgaatttattaatcaagatgaattattagcaactattgaaactgataaaattgatgttgaagttaatgctccagtctctggtacaattactgaattattagttgctgctgatgatactgttaccgttggtcaagaaattgcaaaaattgaaccaggtgcagctcctgaaggtggtgcagctccagctccaaagaaggaagctaagaaagaagaagctgctccaaagaaggaagaatctgctccagctccaactccaaagaaggaaactccagcaccagctccaactccaaagaaagaatctgctccagctaccccagcttcaaatgattcagctaaatcaacttcaggtaaattacctgaaaatattaacccattcggtaacttctcaagatctgaagaaagaattaaaatgaacagaatgagaatgagaattgctgaaagattaaaggaagctcaaaatactgctgcttcattaactacttttaatgaaattgatatgtcatcattaatggaaatgagaaaattatataaagatgaatttattaagaaaactggtgttaaaatgggtttcatgggtgcattttcacgtgcttccgctttagctgcaaaggatattccagctgttaatggtaaaattgaaaatggtaatactatggttttcagagactatatggatttatcaattgcagttgcaactccaaaaggtttagttactccaattgttagaaatgcagaatctttatcaattttagaaattgaaaatgaaatttcaaacttaggtgttaaggcaagagatggtaaattaactttagaagatatgactggtggtactttcactatttcaaatggtggtgtctttggttcattatttggtactccaattattaatattccacaaactgctgtcttaggtttacatggtgttaaggaaagagcagttgtcgttaatggtaaattagaaagtagaccaatgatgtacgttgctttaacttatgatcacagaatgttagatggtagagaagctgttactttcttaagaactgttaaggaattaattgaagatccaagaaagatgttattaatgtaaatatctttcagccatttacttcccacttaatgactttcattatttctatttgttggataacaattgaaatttaatgtaactcttatttatcaattttattatatataattattagtatattttattattttatttattaatatcacctattcatttaaagtattacgattgtgaagatacacgagaaaataattttttgaaattttaaatgtttacttaagtaattaatgttcttctttttaacaaaaaggttaaaccccttgaatatgttggtgtaatagtatgaataacataaggaaactagctaatttgcaaaaatacttcctatatacagacacctcaatcacaaaagcaccatattttgtttcaattgcattagaaatcgaagttaaacaaacaataaggcaaaaattaggtgaattagtaagtaatgttaacaaacagctaactgaaaacagttttaaaatgaaaacgggtcactatgatcatattcaattgaattacacccaaccaccatgcaatttcctaagattggatctaccctatgaaaatgtatgtcaaattgatttatcaaataatgatgtctcaaatattgtagatcctactgtacgaatatacagacaatattttgagaatcagattattacaactggtgatttagaattagatacttggtggccacttaaatatacatatttagcatacggaatacaaacagtcaaatttcatgtaactttactacctaatgttctgttcaatgaaccagataatgcatttaagttctttcaaataatgaaaaattcaattggaaatactaatattaaattgcctgttaaatttaacaataaattaaaagtattaagcaaatataattacgagaagtttttcctagctttatgtatcgatagggaagatccaataaataataatctaaaagatttactcttgaaaatatcagatacgagagaaatgattgattcaccatttattcgtgggaatgttattggtgaaatcgatgataatcatataattgattggaaaaacagtttactacatacttcaataggagtttcaaatgtattgaataatgatgatttacgttttggacctttcgaattgttcttcctaaacaaagtgcttttaggaaatgaaaatatgattgacttaaatgaagtatttgaaggttctcttattttgactattaatagctagcaaactgtgtataatgcagtttatctttgtgtattattcatgtagtggacgatcgacctgtctgtcttcccaaataggcaattttctgtgtttcaatgtttttcatttgatctgtgtttatctttttcctaaataggtattttaattgaattgctttaattaaatttgttttacagtgacaatcagcatggtatcttagataaatcatctcagaaaaaggtttcagtaattttgtttcttgtcctagaatcctattgattggtttttgataatattttcttttattttgggcttgtacatttcttaccttacctttgcttttttgagtatcaatttattttataatagattttatttgagtctaagaacaaatcacacactcattttaaataccaaactgaacttagaagcataattttatcaaaattaaagcaaaaacaatcaattgtggcattcaattactaattttaaaaagctacaaacacatatttacaaatcttgtataattaaacactcaaaccaatctaaaagtaatcataaatacctatacaaaaaaactaaaaagctttcactacagaaatgaatttcgaatggagggaggattcactcaatcctttcttaaccccacctaataaaggtttatcaaattatcaatttggcaaacaaaatccattaaaagcagatggtgattttgaaacaataaattctcaatcatctatattcaaaccaatcccattacctgatgatatattaggttttgatccaataccatcagattctcgtttccaatttgaaaatccattgacaatgcaaattccatcaaattcacaaactaattttagtgaatttttagcaaatcaagaaccaatgtcaattccactgaatggacaaaataatcaatacccatatcaaaatactaataataataatagttttaatattgataattacctcaagggtagtaatactgattacaatgataatgatttcttaggatctgaaatgaatttaaatttgaactataacggaaacattaatggtaaagaaaatgatattgagaaagttatgttggatttaggtatatccgaagcacccgtacaaagtcaaacaactcaacctaagaaaacacatagacgacaattaagtggttctgaaatttttgggattgttggatcagcagataatttacaattgtcaatccctggtttagaaactcaatttttaggtaagaaaccactttataaagacattaaaagttacgacaatttggaaattttcaacaatgcaaacattgataatataagtgtacctccaattgatatgggtcttgatgtaattgacattgcaatgggattaaataataattacaatttggatataaattcaggtatgaacatagaaacaaattacgatatgaacatgaatgtgaatctaaattcaaattcaaatatcaatataaataatagagtgaataacaataacccatcgacaccaattaaagcaccaactccgttatcaagaaaagaaaaacttgattattacgtatcttctggaaatccaaattcatataaattcccatcaccgcctaaaggatcatttacaaacaaacctataacacagcaaaatatatctaaaatacccacagaatcttcaaattcactagcaaaagttaaatcatccaacaccaatattttggataatttcttagctgatgaatcatcgccatctaaaacaaatttaccaactccggtacctacatccccattaaattcagttgcaatgtcttcacctctcaaaaacaactttcaaacccctaaacaaggatctccaagaaaaatctttgtacatacacagttcacatcaggtaaaaaagttgcggatgaaacaattgtacttgatgatgatgataaagatcgtacaatatctgaaatggcaactccattaaatggtaaagtaaatgttttaaatatgcaaacacctacaaagaaaaagaaacttttaacaaggttacaaaattgtgaagatgcatcattattaggttctccaatgaagaaaaatatatttacacataaatcaatcaaaggaccaaataaaacggcaataagaaagaaaccaactattacatcaacattagcaagtggttcattagaacaatattttattggtccaactcgtgaaggtaaatatatttgtaaattctttgataaggaaattcaaggtgtttgtaatagagaatttcatagaatttcaaatacaagagcacatattcaaactcatttatctgatagaccttttgtttgtgatgaatgtggtaaagcattcgtacgaaatcatgatttgaaaagacataaaatgggtcataaagctgctggaaatgtttgtccttgtggtaaaggatttccaagagctgatgctttgaaaagacatagggcaagaaatatttgtgttggtggatttaataataaaggtgcagttagtaaaccggaggctacggaaggtaaagctgttaataacaaattatcagataaaataattgcatctatcaataataatccaaattcaattcaagttaaagatatcaataagcaagaagataataaaccaaaacaaccaaaacagcctcaaaccgatcatcaacataattgtcaaaatcaatcgtgcaatcatcaacatcataatcataattataatgattcaaaagactcttatgactacaaaaattatcaacctagtcaaggaacctctaaacctatcagtcaaccaaaatcaaattgtcctgatgaattggaattatttgaatttgatgaaataccaggagttgataataatttttcctttaatatggaggatagtatagtgatatgaagttacaagttttgttaagtttcgaattaccataaaactcatatcaccatacccaactcccttattactgttgctttttataatttttttttagttttatttacagtcttaaaaaaatatacacaattcttaagtaaaataacagtctataacaaaaataaataacaaaatgaatgaataagtaaataaataaataaaatgtctaatatggaataccattggtaattctttggaattcatcataacctttagttgcaacactttcaaatgatttcttaattaatcctctaacataaactgatgcttctttatctgatttatgaggtgcaaatctttgagttaaatgtttaatggttgcagctttaaaacatggtaatccactctctaacatcggaataaccataccaattaatgaatccatatgtaatctacatgcaaggaaacatttaacacataattcttcaaaccatttataagcttgtgtattaacattaccacccataactctaaccatttctctagttagtttaaatggtgattgttcaaatttaacaccacctggaacaatatcaaaacaaaatccaaaatcaatatgtaaaatataaccatcctgatcatacataatattaccattatgtctatccttaattgctaataaataagtaataattgaataagctgcaagtgatttaacaaaattaattctagcacgttgaaattcaggtgatgtctcagatccaaattgtgaaataaaatattcatataatccattaactgcttctctacctaacatatctcttgaaatggatcttggtaaaacatcaataataccacaacctggtgcagttgctgtaactctatatgggaaaacataaacatcaacacctgctgtcatccaaatagttctaaacattgaaattaattgtaatgctaaaacatcttgtctacaatcatcaccaactttgaaaatagcactagttttgacaatttcataagcttcatctttatcattatcatctttatcattatcatcagtacttttttctacactttcaattttctttgcatcttcaattgaatatgcttctttcttcttcttaatataaaatgtggccataaatggtgcctttgcatgagattgtaatggtttacctgattttctatcaatatcaataacagttccatcaggattacttggtaaataaacaccttcttcaactttaatcttagccatttcttcatcaattttggccttcttttcaggtttggattttttaataaatggctttaatttacctgaaatacctgtaacatcaccaaagaatgaaaattctttctcaaaatatgctctatcataatctgaaaatcctttaatcatagtttctctaatttcatctaatgcaggtttaattgaatcaggtattgttgaatcttcatccttaaatgaatttgctgacatattccaaataatttgatgtgcaaataattgtgaaacattagcagtttctaaaataaatctacgaatataacctaaatcatcatgtctaatagtttgaacaatttgtggaacataaaaaaatgttaaatgaacattaaaactttcaattgaacgcattgaatattgtaaaattaatgaatttctattatatggtggtaaaaatttattaattgcatcaactggtgaagctgatgcccatgcaacaattgcaacaacatcactatcactaatatatttgaaagctgatggatatttagcaactttaaatggatttttgataattaaagattttaaagttttaatcattgataatgggatattattcattttttcaaatcttgaaattaaattgactgcataaattccatcaattaaataagcatctctaagtatcttatcatcaagtttatgattactataaattttagaggatgcaccaactccagataatggatgaatccaagaacttaaaatattaatttcattatcaataaataataagagtataattttccttttttcaaaattaacatccttaaattgaatttgactaaaataatttgcaacaatacttaaaacttctaaatctgctttaattttcagtttattattaccaaatggtgttgtgacatcttttttaaaccatgataatgcaccatctaataaaattttaataattttatctttcattgagctatttaaaaaaatatgatgttttagaatttcacaaccaaaattaattaattcaaatctaattagacgtgcaaaagggtgtaaacttgcagattttaaactttctattgcaattaaaattgaatttgtaaacatatttaaaatatttgaactttgatgtaatgttgcttggaaatgtgatgataaaaatctgattaataataaatgtgacttaaatgatgaagatacaactttagctttactactaacaattgccttattacttggtaaatattccatcggattaaattcaggatctaacaaatcattttctcttgaatataaacctttaccttcaaatgcagttttttcaaaattttctaaaatatatgataaaagtaatgaagaatattctttctttgaattcattatattcaaccaataaccaattgaatgttcaattgtataagaatcaaataatttaaatggaatattaacaatccatttgacatatttagctgtttggttaggtattgtaataattactctaacaatatcatccattaaatcaacaaatttatgatgtaatgattcattattagattttgaattaattttattaataaaatttaaaattttttcatctaatttaatgaataatttattaatatcacttaaacctgcttcaattatttttgaatctgatttccatgtagtttgtgataagaatcctgcagttgaatttaatttctttgattgaaatccttgtaattgataaaattctctatcatttgataaaattttacttgccatatctaatgcaaatgaaacaccataattaattgttctatgtgatgcatctgctttcataacataagatcttaaaactgatttcatatcaccatcacataatcttaaagtatttgtaacccaacgtgttgcatttgatgtaaatctatctaaagtttcttgtctccaagtataagaatcagataataaaagatcgatatctgtaactcttgatttaaattgtgtcattggttcatattcattagtatctgcatcaattatactttgaaacaataatgctaaaatatccagtaatgcaaaagtactaatttcataacataaagctgaaggaatcttagataatataatgtcagcacatttgaaagcagtattttgtaaatcaatattacgatgacagcaaaaaatgaaaattgttttcaatctatttgtaactttttccattgaaagatatgaatttttagatgacatatcatgagaaaattgatttgtacaataattagcaattaatgaaacattattatgtagatttgcaattataactgaaggatcagacatatattctaaaattttagaacaatcacctgttttaattcttaacatttcaaccattaaagttgaagataaaaacattaaaccaggtcttgacatttgattatcagaatctaatgaattaccacttttaattgaaacaatatttttcaaaatatctttatgaattctttcagttgtctttgatgtaccacgtcttaaaattgtattcatttcaattgaagtttcagttctattccaagtatattcagatgctaaaggtggagtactatgagcaattcttaataattcaggtaaacattctttatataatgatgaattataagcaaatccatgaacagtcaaattgaaccaagcatcttgaaatctacgaattgtttctttatcagttggaattcttggtttttcattaatatttggtaataaattagataaaggttttaagaaaagtataatttctctagctgattcagtaactagttgatttgatctatgatgttctaaatcatcgatatcaccctttgaaataatttgtaatagtaaacctttaagataaattgaatataattcttcatttttagattttgacatagctcttgaaaatttattccaagtttcaatacttaatttaaaaccttgactatctttaattgaagattctgaaacatcataataatattttaataatgatgaaaagtcttttttattcatattatcaacaaattcagttaaaccatctaataaaattgaatttaattcaattgatgatggtttaattttttgataaagtaatgttgtaactaaagttaaaattgattcatcatcagtcgattttgaaatttcaacaactgagataacaaaattttttgcaattaaatcatttctttcaattgctaatgattcattagctaaacttttatttgaatttagattatttccatttccatttccattattattattattattattattgctatcattatcaatcatgttaatcagtgtataaattaatgaaattaaatcatcctttgataaacttttcatacaatgtttaatacaattagcaatttttttaacaaaatcagttggcataacaatattttgaattataattgggaaatgtttaacaatattaagaccagcaatttgattttcctcggaaagaatagcagcagttgcaaatacgttaattaataaatttgaactaatcatttccaaagccgttgttgaaccatcttcaattgaattcataaaatcagataaatatttaataattttatcatttaaaaattggaaatttaaatttgaaattttaacatttaaactataaatttctaatgaataagcattaattaaaaatgaagttttacgacgataaattgatgaattaataattctatctgaagaattagaaatataatcgtcaattttatattgataattaagtatttcattgaaaatttttgaatttttctctaaaattgaataagaaatattttcataattcatcaaacgatcaattaatgattgatccttaactgcatgaatgataaattttaaataattaatttgtaaattttgaagtaaatcaatgaaatataatgaagaatattctatatttaaatcattaaagttataaatcaattcaatatcattttcattttcaattttagttaagatatgttcaattgaattgaagaaattgttattacaaacagatactattaagttaaatatatcttcattgataatagatggagtatcagtaagtgcattaatgaatccaattaatgaaaattgatgatataaattattagataatttcaaatttgagatataatcattaaaagtaaggtaaagtaattgattaaattttggaaaattaatagttaaatgaattaatgctttagtaatttgataagttaatttagtccaaggagttatatcattctctaatttaaacaaagttaatgatttaaaagatttatttgatgaaaatataagatatttagataataatgggaataataaatcaacgtaaatttcagatttaaaatgaattgcattatcacaaactgcgaaaagaacgtttaattcagaattagttattgattcatcagttgaagattttaatttagataggattaatttaaaagaatctgagataatcaatgtatcattattattattatcaatatttacatgttgttgttgtttagaagatttagcacataataaagccaatttattccaagcttgggaccttgtattgaaattgggtaaactgtgagatgttagtatatcgattttaagagttgattacctataatacataccccagaaagtccatactggatgaattgtagaaagaaagcaagtgaaggctctgtataagttcttctcgtggtggcgatatattaaattgacgtcttatagttgcccctttttccaaattatttaagaaattatgattattacgtaagataatttataaagaaaagagctatttatacagttataagatataggatactacactattatgaataagtttcaataagagtatctcttaagttagaaccaatagcatcaggttgattatcttgtaatctaaagatactttctataacagataattctggagctgttgtatctaaacctgcaactgcaagccaatcattaacaaccatacctgcaccaacaacatttgaacctctattaacagtacctgcaacaatgggtacttgtaaaagtgatgataattcttcttgatcttgtattgaagtttgaggatgaactaaaccaccttgatttgataatgaacaatatgaaccaacaaggacattacctgcaattgtttgtttgaaaacttctacacctaaaacatctgcaataatttcttcagtttctctttcaatatctggatgtactaatgcaacataatcattacaacatataacattacctaatgctgataatctttcttcaattctttgaattttaacagtatcaggaattgaatttcttaaatgtaataattcttgatctgttgtttgagttggaactaataaacctcttctattacctgcagtcatacgaccaacaattctagtacctgcaatagttgtatgaataattggtataacatcacctaattctgcttcaaatgctgaataaaaattttcagaacctccaactgcaactaatgaatatgagttagttaatttggaaaaaacaccaacttcattactattttcaaattgtgctctagcagccatctttatactaatatatactgtgtatgatcttatgaaagaagaaaagtattataaataactaaaatatacaatttccaaccattgaaagtaaaaaaagcaaaaaaaaaattttctctctctcttactaataatactaatagtaatagtaatagtaatataaaataaccactcgcgaaagaccgtaatataaataatataggcgtttatctcttctttgcaatttaatatctatacactggctcatcttaaactaacaataaccaatgaatagacaacgttcaaagcaatcacaatttaaaatagtactcttgggagaatccgctgttgggaaatcttcagtggtacagagatttgtgaaaaattcatttgatgaatacagagaatcaactattggtgccgcattcttaactcaatcaattcatttatcgaaaaatgatatattaagtagtggcgataacgataatagtattactacagatactatagatgatgatggtatcacagttaaatttgaaatttgggataccgcaggtcaagaaaggtatagatcattagcttcaatgtattatagaaatgctaatgctgctataattgtttatgatataactcaattagagagtttagataaagctaaatattggattaaagaattacagaggcaagcaaataaggatacaattataatacttacaggtaataaattagatttaaatgatgaaaggaaaatttcaattgatgatgtaaatgaatttacaaatatttataatttacttaattttgatgttagtgctaaaactggtgaaaatgttaatcaattatttaaagatattgcaattaaattagttatcaagaatttgaaatcaaataataatttaaatactacaaataaacattcaaatactatcaatttaaatcaaaataccaataatactacaaatgatcaaaattgtgcttgttaactaaattatattatactatattatattatactatctaaatctattaataattaattgatcaggtccaacttcctcatattctgccttagaaacccataattgatgaaatgtacctaatgatgataaaattgatccaccaatccatgatgcatatttcctttcaattgaattaccagctgaatgaactctaatttttaaacttggattatttaaaactaattcattatttaacctctcatttaatcttggtattaatgtacttgatcctgttaatactatattattagctaattgaggttttaaatcaatatctaaattatctaatacattttgaattaattttgttaatccaacgggtttatcagtagtagtagtagaattaccattactatcatcctttggtattatatcaccttgtgtattatcattattattattattattattattattattattattattatcaccaccttcttcttcttcttcatcttcattctttttacctgttgatcttcttaatggtatataatctttattagttatttcatttttttgtatttcgaaaatttcacttattttaccagtaaatggattctcataattttcaataacttcccttgttaataaatcatctggattaaataatgaatttgataatttttgtctctcaaattgtgtaaatggaatattttgaccatttggtaattcaaaccatctagtttcttcactttcaacttcatttgtaatattattcttttcaatttcatcatccattgtacattctaataataattctttcatttctcttaatgttctcaaatatgaaaaatcaataactgattgatcaattggattatcaaattttttcaatgtaaaaattgcttgatcatgatcaccccaataagttttacttttattacttatttgaaattgtggtatataagttagtgatttttcatttaagaatgattttaattgcatattgagaaaattaccagcatattttgttgctctaacttgatttcttaaacataaaccatcaataattggtgtaacagttgttaaatcatgtccaatatcaacaattaaacaattaggtctaccatgtgcaaaacttacacatgttggttgtttaacagtatacattgcacaataattttcagtttcgaaaaaatattccattgattttaatttattattataattattaaatgatgattcagttaataataatggttgagttgatggatcaatttctaatttttctttaaaatattcatattgttttgtgaaaatttcccaatcattgataatattattagaaataattgaattgattgttaaatttgatttactatttgaaaacattacattttcatcgaaaattaattcatcattacttttaccataatatgatggtaaaataagtgatggttgatcattacctgcataacctacttgtgttgtataagatcctggatctaacactatagcatctatctcatctgctccatatatctgtggtgctgctgtcttctccatgtctattggtctatttgaaaagaaacacacactgttgtgccaatatgtcttgaattcagcgatatactaaatttgaaaaatctctaattacgttaattttataattaatatatattggaattgaattcttgagatttataaaaataataataataatagtatataagctacatgtatgaatgaataaatatattatatatacaacatctaagcggagacattaacttcagttgataaaatatctaaaaggaattgaatttctaatttacgtctagcatctacaatccaatcatttgcaatttctcttggaacaccctttaatgatgtaacttcttcaactgcatcatctaatttatttttttgtaaataatcattaacccttgcaataactgattcaacatcgttaccaataaattcatcttttgttttaattggtacacctgattttgaccataataattttgatgccaatgatgatgaaatataacctaaaatacctggattttcaggtaataaagaaactgatcttaattgtggtattaataattcccatcttgataaaatttgtgattgtgttaaaacacctccattaagtaataattcattagttgatgggaatgattcaattgttgtattaattaatttattatctaatggttcagataatttctttaagttagaaatttccttaactaatgattcacctctaatatcacttggagagtttgatacaattaatgaattaattttagataaacaaattctaatttctttaaaagttgtataggataatgcaacttttgataaatcattttccatttgttcaattgttttaattctatcatttaatgcctttaaattagataatttaccatttctttcagtttcaattttttcattgattgaatcattaaaagttttcaataattctaattctttttgttttaatttattttcatattctaaatgaattgtttgttcaattgaatttttttcattttcaattattgccttatgtttagattctaaagatttcttagttgcttcaacagtttcagttaattccttaataacagcagttttctcagattcaaaactttcctttaaaatttgcattttttcttcagctaatttatcaattgcattattatcaatagaagttcctttctttacttctttaacagcaattggcttaaaagatttaattgcatcctctaattgagtgatttgagatgaggaaacttcacttgattcattaatatcagagataagtttattaattgccttaacaagtggctcagcatccttacttgaagctttaagtaaaggaatttgagctttcttaatatttttatcaacaatttcagttgttggaacagctggaattgggtcagaattagatagtacaatataattattatcatcctttgaagctgttgatgcctttacaggaattttctttttaattgattcatcatcaacttccattccaactaattctttaactttattaatattagattcaatttgttcaacttgttcattataataacctttataatcaaaggatgcaatatcatgagcaatttgagctctatgagtccaaacataatcagttttatctaatgcccattcaccacctggaacgtattcttggaaaggttcctgtaatggttcataaataagcgcagtagcagatgcggtggcataaacggcagcggtagcagcagagaccttagtgaggaccccaacagtcttaaaagtagatctaatcatctttgtctgttaattaaacctataataataatataatacacctatatagtaaaacctctctctactgtaatatgtccaatttctcaaaaagctcattcattcattttttgaagcactgggaaaattgccattttaatttccaattggtgaaaatttattcttttcattaagatatatcataagaacagtatactaactagacatagagacaatatgcaagctcctgttgtgttcctcaatactgctactcaaagatcatctggaagagaggctcaagttgccaatattgcagctgctaaagctgttgctgatgttgttagatcgtgtttaggtccaaaagcaatgttgaaaatgttattagatccaatgggtggtatagttttaactaatgatggtcatgcaattttaagagagattgatgttgctcatcctgccgcaaagtcaatgattgaattaagtagaactcaagatgaagaagttggtgatggtacaacttctgttattatacttgcaggtgaaattttagctcaatcttatccttatattgaaaaaaatattcatccagttattattattcaagctttaaagcaagctttggaagatgctttagatattttacattctatctcaattccagttgatttaaataatgataatcaattgaaaactcttatatctgcttcaatttcaactaaatatatttcaaaatggtctgataaaatgtgtgatttatcattaaaatctgttagaagtgttttagttcaagaagagggatcaccaatggaaatcgatttaaagagatatgttaaaattgaaaaaattccaggtggtgaaattgaagattcaactgtacttgatggtattttacttaataaagatgttgtacatccaaaaatgagaagaaatattgaaaatccaagaattattttacttgattgtccattagaatataaaaagggtgaatctcaaacaaatgttgaaattacaaatgattcagattggaatagattattacaaattgaagaagaacaagttaaattaatgtgtgatgaaattttaaaatttaaacctgatttagttattactgaaaaaggtgtatcagatttagctcaacattatcttttaaaaggtggttgttcagctttaagaagagttaaaaaatcagataataatagaattgcaagagcaacaggtgcaactattgttaatagagttgaagatttgaaggaaactgatgtaggagaaaaatgtggtttatttgatattaaattaattggtgatgaatattttacatatttaattaaatgtcaagatccaaaggcttgtacaattttattaagaggtccatcaaaggatattttaaatgaaattgaaagaaatttacatgatgcattagcggttactagaaatattttcttagaaccttcactttcacctggtgcaggtgcaactgaaatggcaatatctgttggattagctgaaagatcgaaaaaaattcaaggtgtacaacaatggccatatcaagcagtaagtgatgcatttgaagtaattccaagaactttagttcaaaattgtggtgcaaatccaattagagttttatcacaattaagagcaaaacatgcaatgggtaatcatacttgggggattgatggtgataatggtaaattagttgatatgaatacttatggaatttgggaacctgaagttgttaaacaacaaacagtgaaaactgctattgaaagtgcttgtatgttacttcgtgttgatgatatcgtcagtggagtccgtcaaagtgcttagtttatgtactctatctctatattatgtatatacgacatctataatataataaataacatctctttatactacataaaatactatattagtaatttttcatgtgtcgtgataatttattatggaatgtattttgtctctttttctgaaactttattttatcctgaacagtgaaacaatgatgattagacaggatcataccccagttctatccagtcgttctcgtagttttagtgaatctcaatctcaagctcaacgttcttcaagagcggaaaagagaatgggtagattgtttcgtcaaaatacaacaactgcaaattcatcaaataatttaaagaataatcaaattgatgaacaaccattgactatattgtcattatctaaacaatatgttatggtttatcaacagatgaaagttacaatacaatcattaaatttaaatcaaactttacaaactaataatattgattcatttattgaagtaattgaaaatacagagaaacatttatcaacaaaattaaatgatgatatgccaattgattataaaaaaattaaaacttatttatcaacatcattatcttcatccatacaggaattgaaaaaggtaattaatatattgaaaacttccataaaatcacaacaacaacatatcccaatattcttattaagatcaactttttataatttattctcgatgtttattgaactttctaacatagcacaaacattaactcatatatctgaatcatcaactctatcaaactcatcatcaatatctactaataataatatcaacaacattctaaattctcaatctactaataaatcacctgcttcagattcttcaacaacttttattcctgaacctaaattagatagacaacattcagatttagcatcagataatgatacctctggtgataataccaataataataataataataataataataataataataataacagtactacagactcattgttcaatcttatactgcaaactattcaagctgcacaaactgtttatacacaaattgatgatgcaatttctaaaaattcaattaatgaaaatgaatcacttgatccattccttgatattgaaaatacaatttctaaaattaaagaattaaaatatcaatgtgttgcatcaatggaacaaacaaaacgtgtacgatcattacttaaattatatgaaaaaaattcaaatacatcaaatgattttgaattaaataaaaatatttatgaacaaacaaatattttccttaaatcaattattaatattttagctgcaactaaagctgcaattactaatgtaccaacattaaatgatgttagatcatcattatcaattttaactcgtgcaagtaaggaattaacaattaaattagaatcaagttcattgaaaaagtttgttattaataatacaccttcaaatacaacattaattgaacaaccaaatttatcttcaataccttcattaccttcaataccttcaattcatgatactcaacaagatgatcaacccgtattaatgaaaaaacattcaattttaaagaaaattcctgaacaagatgaatcttcactgggactgttaaaacaacatattaaaaatcttgaaataaatacaaatttcaataataatatgaataataataatgaaccagataatgatgcaatggtaatgcatactccattagctgttacaactccattgattgcatctattggacctgcagttgcaagtgcagttttaccaattaaatcaccattaaagatggcaagtaataataatggtacatttaatattaatgatgcttttgaacaaaataataatagtatggaatcagaatataatccatttgagaatttaattccaaaagatcaatagtattgtttctgaataatatgtatattatatttaattaattattaagtttataaaaaaattataaaaatcaaaaaaaacctgtgatattatatttacacgtgaaaagtataccttcccctacttcattcatcatcattaagtcttgaatatgctgattgtctattgaaaattctccaaaatctagttaaaaatcctttcttagttttattattaataataaatgaatctaaattaaattcattaatttcatttcttaaatctgcattaccatcattccaaccaagattaacttcatcaaaattaaattcaagtaatttttcattatttttcttcagatcatcaatattccattttttcaatcttaatgaattaacaacaactgatgttgatgaacatgccattgcggcacttgcaaacataggatttaatgttctattaaatggtataattaaaatacccattgcaattggtaacataattaaattatagattattgctaacatgaaatttaatctaattgtatggaatgttgatcttgaaatatctaatgctgcaaaactacctaataatccaatatgtgaatcattatttgactccattgttgatgataataaaacaatatcagcagcactcattgcaatatcagtacctgatgaaatagccataccaatatcggattgaactaatgctggtgcatcattaataccatcaccaataaatgcaactttaagccctttattctgtaatccttttatatattctaatttcatttcaggacttgattctgctaatacattatttagcggaatacctaataaacctgcgacatattttgaagtttgaattgaatcacctgtaaccataccaactgaataacctgattgaataaatgtttcaatagttttctttgaatcatcctttaatgtatcagataattctatgaatccaataaatctattattaattaaaatataacaaattgaactaatttccaaagattttgtattttcattgattgattcatctaattcattcatattgataacttcaaatgattttaaaaatttagggttacccagttttgcatcaagtttttcgttggtttctaaattaatacaatttgttgaaatacctaaacctgcatgagtattaacatatgagaattcaaatggtattatttcattattacctaattcattcaaagatcctttaactaatgctttagatattggatgttcactatttgattcaattgcatgaactaatgaccaaatcattctattatcgtttttacttaaaaacttataatttgttaattccatgacaccttttgttaaagtaccagttttatcaaaaatgatagtatcaattttattagcattctctaaaatttctccacctttaattaaaataccgttagttgcaccaacacctgtaccaaccataacaccagttggagctgctaatcctaaagcacagggacaagcaacaacaataactgaaattgcaatttgtaatattttaaaatattgaatttcaagtgttgaattttcttcattttccttaaggaaaaattttggtatatgatcaattggagaacaataaacgtacatagtccaaaaaatcattgtaattaaagataaagttaaaatcagaataacaaaaactgaagcaattgaatcggaaattctttgaattggggcagtagaaatttgtgcatctttaactaatttaacaatttgttgtaattgagttttttcacctaaagttgtaactttcatataaatagtagatgtaatattaactgaaccagcaattaatgaagatccaacatcttttataactggtaatgattcacctgttaataaagattcatcagtttcagatgatccaaaaatacataccccatcagctggaattttagaacctggtaaaataattgcaatatcacctttttgtaataaatcaatagaaatttctctttgttgaattgttgaactatctaaggaataaattgaatttttttcattatcaaaaatatttgaatcttcaactataatacatgatgatggtgttaatgataaaagtttagataaagcagatgatgtattaccctttgccttactttcaacccatttacctatcccaacaaacaggaacaacattgtagaagtatcgaaaagcacatttggataagtatcagctattaaaccatggaaaacacttatgagggaataaaaataaataattgtggttgaaaaacaaattaaaacatccatactaccagctttatgttttaatgatttataagtattaatatagtatttctttcccaatgaaaattggatatatgtacttaatatcaattgtatcattatatcaatataaattcctctgtaaattttaaatgaattcaaattccacttgaagtatttacgtagaattggtaagatatgtgcaatgaacataagtgggaaaccaaatttcagtaaactgaaaacattatttttccaatatcttatttctttaatcttagataataaatcaacttgtgatgaagtatctaatttattgactaatatagcatcataatttaattcattaattttctctattattattcttacaccgataatatttgaatcgtattttatatgtactatctctgatgcaattgaaactgtacaacttattatccctggcaacggtattataacattttctatacttattgaccaagttggtgctaatgaaccatgaattttcaagtcaatatcattaatatcagtggtggtgttggctgtggatactaccgctaatgtaacttcatctactttaataagatttgcatcaaatcctacatcttccacagtttccaatatttcctctacagttatttgcttattgaacaatactgttgccctttcagttaataatgatacattaacttcctctacaccattaagtccctttaatgcattagtaattgaattaacacaagcggaacatgtcatacctcctattgtaatttcagctttatagctaatatcattaattttatcattatcacgtaattctaatgacgatattaaattaccatcaaatccaagatcatcaatggtatttagtatatcatcagttgagatactattattatgaattattgtagcttcctcggttatgagtgatacatcaacactagaaacaccttcaagtttcaaaagttcattagtaattgaattagtacatgaagaacatgtcataccacttatttggaaaattgtcttaaatttagataaattatttgataatttctcaaatttttcatttgttaaattagaattataacttgaatcatcagttgaagaaatcagtgatccatcaaatcctaaatcatcaattttttcaagtaaatagtcagaagttatttgaggattatgcttaataattgcttcctctgtcagtaatgaaacagaaactgagtctacatcatccagtttattaatacaatttgtgatagaatttgtacatgatgaacatgtcattccagacacttgaatggtggtagttattgtcattaccctgttgaaagttgttcaaaagatggaaatgaaaagaaataaaggtacatcagcatgctctttatattgaaaaatacctaaaattttattttctcactttctgctaggttggcgatatctccggactttaacggagtaacagttctttatctattatctatattctctatattagatctatatatacactttatataacggttatctatctatctcttaacactggtatgtagcttattctccttaataatacacacagaaattaaccctagtatggatgcaccaaatgcaaatataaaagtataccaaacacttatattataagattcaatcattaaattaactgcccatttaggtgcattatttgatctaatatattttgcatcatgcattgcattatcaatgatcttattcaaaactttttcagaaacatcatcaggtttatttgatgttaatttattaattaaataatatgataaattattagtgaaaatatatgatgaaaatgaagttcctaaagttgaacccatacttctaaaagcatattgaattgaagtaactgatgtttgatgttcaattggaactgctgcaattaatgcaagtaatgtaactgttaacattgatgcatatgcatttatagataatacatttaatgtaaattgttcgaaaattgaaggataagtaccaggtcttgttctaattatcatcaatatcaaacctaaacaaccaattgaattaattataattgaaaatttaagatatttaccactccatttcatataataaccacttaaaattgatgataatgatgcaactataatattaggaattaatctaataccaacaccatctgatttaatacctaaaacagttgaaagataaactgggaaataatacattataatatatgaatacattgtaccaaaccaattagctaatgaagaacctaaaactgatctatttttcattaattcaacaggtataattgcaaatggatgtgaattttcaactttatataatgaataaataccaattaacaaatgtaatgataaaataaaataaacaaatttatcttcaaaatttgcacttgccataataataagtataagtaaattaaatgcaataaggaaaatacctttaatatcgactttcttcaatttttcactcattgtagtaccactattagcattttcaatttcatgtggtaatggaggtaaattaaatgaaaatacaatcattaaaaagcaaattataccaattggaacttgacaccaaaaggccattctccacccccaatgttgtgaaatccaaccaccacaagtaccaccaactgctgaacctaaagcaaaaaaaatattacctaaaccttgataaacacctctatctcttaatgggattaaatcacttgaaataatagtacttaaagtaaacaaaccagctgcaaacccacttaaaaatctaccacaagtgaaagaaataacattttgagctaatgcacattgtaaacaaccaaaagtgaaaactgcaatacaaattaataataatggtttcctaccgaaaatatcacttaatttacccaatggttgaataattgaagttgagaaaagataagcagttgcaatccaagaaacgtaaggtattgcattaagatcagatgcaatatctgtcattaatgttgataaaattgttgaatctaatgaagctaagaaaactaataaataaacaggtattaaaattgctactgtttgattatatggcaataagtaaccatcattctcagtgttatcattatcaatttcattatcattattttcgactgttccataatcttcaataatttcttcagctatgtaaccaggtaatgaagttgaggtatcatccataacatcagccagatggctcttagtaggcaccaaaggttgagtggacatcttgttgttagaaattgaaagaagagaaaagaaatattgtaagaaactgtggaactttaaaactttatatagtccctgaaattttatgattgtcgggattacccaattaggaaatgatagttacgtaatatgttacattctatcgatatctatctatctaaggcattatacactgctctcaggaactggagttgaaataacactgtttgaaacacttattgaattagagttagaattagcattagcattagcgttagcgttgagtaaatgtaatcgtctctcttccttacgtttacgtttcttttcagcttcctttgcctttctattactttcctcatctaaatgcattgcaatggtaaagtcatcactccaatggttgtctattttaattgagtatttaaaaatattttcataccatttgtttaatttagcagttgttgcggtttgaaattctggtttgtttaagataatgtaaataatattaattaatcctgtacttttcaagattgaaattgataaatcagctgttattaatggtgtaattaattcatcaattgatttattaagttttttataattaactggaggttcttctactaattcttctttagtttcttccttaacttcctccttaacttcctccttaacttcttccttaacttcttcctttactttttctttaacttcctccttaacttcttctttctcttctttaacttctccttttgattgttttcttaaaggaaatataagtgattgtaattccattcttaaatcataacaccaattagtcatttcctcaacttcagcacttaaggcagaagaaataggaattgtattaaaatcaaatttgaaatcctcaggttgtcttaatttaagttcatcaactactggttcttcctcgacgtcttcttcctcttcttcatcttcctcttcttcttcctcttcttcctcttcttctatttcaggactttcctctgatccttcatactcatcatcatcatcatcatcctcaaaaacctccatctcttcctcatcttcttcctcttcctcaactttcttaggttttctacctggtctaccacgttttttctccttttcaactacttctttctttggtctaccaggtttcctaccctttactttcttctgtttcttaacaacaccatattctacatcatcatcatcatcaagagatcttttatcggattcaatttcttcttcaggttctggtgttataggtttaccccaactaccccattgtaaaaattcatcaattggtacttcaagtacttttaaataagcttcagttattctcttttttctaccaccacgtttagtctcatgaacaacttctccaccttcagtactttcaataccatcaacattttcaccaacactaattaaataatctttaacaacttgttcagttaatggtttaatattcccctttttagtaaatgaatattgatcatcataataaaatttaacacaaatttgatcaccttgaggataattttctaaaaattttttattctttgaacttgattttaaattatttggtatatcatccaaaggtacaataattgatggccagtctgggaatccctttatttttgataatactaattgttttggtgttaaagttgtcatttgttttaataaaagaatatacagtgtttaaattggacaatattaagaaatttgaataatgttttttgtacaattgcgcgtagtgttgtattatgacattgctgttgttgcctttatgacaatataatgtaactaatgttttatatgtctgtatgcagtggtgatatgatattttaagtgtgtatatagttcaattaggtgtatcaaagtattttgggaaaatatgaagcttatatggtaagaattgagtaagataaagagaaaagtactgaattgacgagccacctaaaaagataaaattaaccaaataaaagaataactaaaatgatttataattgcattaaagacaaagagctataaaatacttacgaacatagaattaattatttttcatggaatttaagccaataaacttgatcaatcaaagttttttcgacagcatatttaattaatggatcattcatatcaccgctaacagcataaccatgagttgtattcgaatataaatccaattgataatgaattttatttttctttaaaatttcctctgatttatatctcaattcttttgtgaaaatatcttcagtttcagcacaagaaataagtaaaggtttatttattgccattaattcattagcagagacaaatgaaggatgagcgaatgcaccaacatcaatcaaaggatttgtggaggtgagataatgtgaaaggtattttgcaccaaaacaataaccaatacctgataaaaattcagtatttggatgatcaattttaaattgattaaagaaatctgcacaaattttagatgttaactccggtggatgatttgttaaccaagcattaaaatcatcactagggacataaacatcattgttaagtatatccataataatgacaggataatccaatttatctgcaaaggtatcagcaattagtttaatgttgactaactctaaaccaaacacattagtgaatatgaaaaggaatttctttgaatcaggagtataatttgaagttacataacaagttaagtttgaaattgttttaattaaaccagttggagtatcggtgtgaataactttcttaccacagcaatgttgttgaggaggatttgatgacattctatgataaagaatagagtatgctaatagcagttgtatttataaagtttgatctcggatttatttgatttttcataatttccaggctgcgcaatatatctgggggttgatctttaatggttaaaataatgagtcagtatttatccatatcaaaggtaattgtattataatgtatgagaataagtttttcaattgaaataaaagagattaaaataagagatggaaataattataatttatttatgataagaaacaaaaatttatattatttaaaggtattataacaatttttacaaccaaacaatgttcaattgatcactttggcattggttttgaattgaataatttacatcttaatttcatacaatcgactttttgaacctattattaatttttaatttaagtaagaaatgaaaaaaggtaaataattcagattaataattcttgatattacgtaaaccctttttgtttacaattaaattctgcttttgtgattcactttataacgtacttccatcccgttttttacaccgctaaaaaaatggtccgaatccgaatttaatttttttccgttttctgaaaatctgcatgcgcaactaacatatttttacttttgcatacaatgtgattttcaagtcgcattttgcactttctacaaagtgtgattcactactaaattaattgaaatgtaaacaacataataaaagtcttatcaagagtttaagaaagttacgtaatcaaatctatttttacgtaagctacaacatatcaatataactaattaagttattattgatatatcaagtactacactctctccccatagagaaactcttattagattaatttaaaaaggcataaaatattaatgaaatattaaagaactatatgaaaactaataaaaaattaattatttttcatgaaatttaaaccaatgaacatgatcaattaaagctttttcagcagcatatttaactaatggatcatttaaatcacctctaacagcgaaaccatgatttgtatttgaatataaatctaattgataatgaattttatttttctttaaaatttcctctgatttaaatcttaaatcctttgagaaaatatcatcattttcagcacatgaaataattaaaggtttattaattgcttctaattcttcatctgagacaaatgaaggatgagcgaaagcaccaacatcaattaaaggattttcagatgtaagataatgtgataaatattttgcaccaaaacaataaccaataccagaaaggaaagttgtatttggatgatcaattttaaattgattaaagaaatctgcacaaattttagttgttaattcaggtggatgatttgctaaccaagcattaaaatcagtacctggaatataaacatctttattattaagtatatccataataataacaggataatctaattttgatgcaaaagtatcagcaactaattgagtattaacaagttctataccataaatatcactaaatataaagaggaatttctttgaatcaggagtataatttgaagttacataacaagttaagtttgaaattgttttaattgaaccagttgaagtaccagtatggattactttattagcacaacaatgttcttgaggaggatttgatgacattgtgttaataaataaataattaaaagaagggtgtattactaagaaatgtactttccaataggagataagctaacccgaggaaatagaaatatccgctgtgtttacataatattataataatacgctgattgtccaataggaaatttcgcgggtattttcaattatatgctgttagtattagtattagcattattaatattataagtaatacagtgtatgctgttttccatttactttcatctctcttctctctttctctttctctttctctttcgaattctcttatgctttcccttcttttaacaacacaaataatttattaataacaatgttaccagctggtgttatcgttgtcttctgtttactctttgttatcggttgtaccgttttcgctcttatgatgattaagaagtttaaacattaaagttaggtttaagttttgttttttagctattatttactctctctatctaattaattaattaatcactcgtttttttatataatataatataatatatttaataatcataatacttaataatactctactaataataatatactgtattgtccaataatattccattataaggacattcgcactttctggaaatttaaaatttcctttttattttccactataatgacttcattaaactattataaactaattaatctctgctttctcccaaataggcattcctccttcctatctgagtattatctatcttctttgtattatattataatctcatttgaatatattaatattaataataaacaatcaaaaaagtatgtaatatcttaatacccttaatgccctcttataattacaatactaacatatctctttatagtgtctgaattaataaacaatcaacaacaacaacaacaacaacctttaaatgatcaaaataataataataataatattatagaaaataattcaaataatgaaaatactccaatagttaataccaataccaacaataatgaagaagaaatggatgatgatgatgatgaatcaaaatcaaatgttaaaagagaacgtcgtaaaattgaaattaaatttattcaagataaatcaagaagacatattactttctcaaaacgtaaagctggtataatgaaaaaagcttatgaattaagtgtacttactggtactcaagttttattattagttgttagtgaaactggtttagtttatacttttacaactccaaaattacaacctttagttacaaaagctgaaggtaaaaatttaattcaagcttgtcttaatgcaagtgatgaacaatcaaatgatgaagatgaaattcaaaatgatcaacaacaacaatctgctccacccgttgcttctgctgttcctacacaacctacacaacccactcaatcacaagattataataatcaacaaaattatccaaataataattatttaccaaatgatcaacaaaatttctcttacggtgattcaactggttatcaataaataattcttataatataatctaatttaattactctaatacttcttttttatacattttttaaaaactttttaatcattttttgtaattttaattctccattaacatccataccatcctctctcatttctttatttcttttcaaaatatcattgaaaaattcactattaataccacctttctttaattcttgatttgcccaatatgttgtagtatcttttgtaaattcaggatgtccttgaaatgttaatatcttatcctttatataaataccttgaatattacatttatcacttttaccaaaaaatatatcatcattattatcattatccttaactctatctctatgaatttgactaataataaatgaatcaatacctaacacaggagtttccatttcaactttaacattaccaatttcccatgattcacttctaataatttcataacctaaactacgtgcaattatttgatgtccataacaaatacctaataatttacaatccgttttaataatagattttatataatctattaacccattattaaatttattatcttcaaatgcatcatattttgatcctgtaaaatatacaatatcatatggtattgtaggtaatttaccattatttacataattataaatatcaattttaaaattattattattattatcattatcaatagaatttaataaaatttcccccatttctgcataatttaaattatcacttacaggtactctatcatcatccaattgaataattgcaacattcaatattttactaacagtcatggttatgggaatcagtggaaatcaaatccgatatcaaatatcactttataatgactattaaacatgaaataattattggaaaatggtatgactcgcataggtgctttttatttataaatacccactctcttatctaatttttacaattttacaatttttcagatataacttttttcatttggcaaagatgaatttagatttacaaaaagacacatacactgaacaacaaacacctgatgagaaactagtttttgctccagatacttatcaatatacactttatcaattaaatgaacaagatcttgaaaatgatccaattgtacaatttaataaatggtttcaagaagcaataaatagtggagaagatattccagagagtgttgttttaagtacttgttcattaccaagtggacgtattagttcacgtgttgtattattaaaggaattagatcataagggatttttaattttcagtaattgggatacaagtaagaaagaaaaagattatcaaactaataaatttgcaagtttaacatttttatggaaaaaacttcaaagacaagttagaattgaaggtataattgaaaaattatcatatcaagagagtgaagaatattttaatgttagaccaagaggtagtaaaattggtgcatggtcaagtcctcaaagtagtataattaaatcaagagatgaattagataaaattgttgaagagaaagaacaagaatttaaagatttaaaagatgatgaaattaaatgtccaccaaaatggggtggtattagaattaaaccattagaaattgaattttggcaaggtagatcaagtagattacatgatagattaacttatcgtagaaatgatattaatgacaataattgggaaatttttagattagctccgtaagttatataaaactatttacttaattaattaaatttattaacaacttttgaaaattcagaaccttgagttttagcaatttttaattctaagtcacttggttttcttgaaccatcaggacctgcaattgtacctgccccccatggagaaccaccatgaatttcatttaaattagttaattcaccgaaaactggtgcataacctaatggaacataaatcataccttgatgagcaattgttgacataaaattaacaattgtcatttcattaccaccacctgtaccagttgaaatgaaaacaccacaaggtttttgatataatgaaccattttgccataaaccacctaatgaatcaataaatgccttaatttgagcaggatatgaaccaaatctagttgggaaaccgaaaataacaccatctgcagaagttaaaatatctggagttgctaatggataagatggttttgcaggtgcatgcatttttaataaaacttcttcaggtaaagtttctgcaacttgataaattgttgcagtattacctgattcttcaatacctgccttaacagattctgcaagagttgcaatgtgatgatacattgagtagatgataattgcgatattagccattgtttagttgttgtttagttgtttgttgttataagagaagtgtataataaatgaaaacagaataaaatgtggcaaaagggtcctttatttataataacgtggaagataaacttgcttattaacgtttcttagtaagcgagtgtttcattattaagtattattaactatattatcaatgattatcaatgattattaactggatgtttatatgattaataagtgttattaagtaaatgatgattattaagtattaagtattaagtattaagtattaagtattaagtattaagtattaagtattaagtgtattataaatgtttctatctaattatacattctaatttaattgaaaatcttagagaagaatctcttaattgcattcttcttctttggtgctggttctgcaactgtcttcttagtttctttcttaactggttcagccttcttagtttccttaactggttcagcttttttaacttctttaactggttcagcctttttaacttcttcctttttattcatttttgaaacaatttcagcaaattgtttaccttgaatattagcaatttttaaatcattttcagttggttgtcttgaaccatcagaacctgcaattgtacctgccccccatggtgttgaaccttgaatatttgataaatctgtaatttcaccgaaaactgctgcataacctaatggtatataaagcataccatgatgagttaaagttgataataaactgaatacagtagtttctctaccaccacctgaacctgttgaaataaatgcacttgcaggtttttgatataatttaccttcaccccataaaccaccagttgaatcaataaatgatttcatttgagctggcattgaaccaaatctagttgggaatccgaaaataataccatctgcttgaactaaagtttcagttgttgcaattggataatctggctttgcaggtgcatataatttagtaagtacttcctctgataaagtttcaggaacttgataaattgttgcattattaccagatgattcaacacctgatttgacagattctgccatttgagcaacatgatgataagttgagtaaataacgattgcaatattagccattgtagttattaaaggaagaatgaacgagaaagaagaagaataaagaatgaaattagaagtaagaaacttaagttatttatctaaaaaggaacaattactaagattataaataaaataagatggctgtgcattagtaaggaaacccttaatcttttcacctctttgtaagcataattctcttattattattaactcttttcactttacagtatttcaaagcaaatttatcaattttaatatttctaacatttatatcactgataaatggttcaatttcttcaattaaccaattacttttcaattggaaaagtttatcaaatctttcatttggagttttcaaattcttcagtgtttcaatattaatgtaattaactgtattggaattagttatatatccaatacctgtaattatatctttaatatcaaattttgtattataattaattggtaaattcatacgtaattcaataagtaaatcatcaattgaaatttttttaattttttccaatatagtagatattataaatttaattattttattatcgtttaatatatattttttgtcttcaatattataattaataaattgatcaatacatggagtttccgtagtgatatcatctgttatatttgtataattaattattaaaaatgtaattattctaataattaaatgatttttaatattatatttttgtgaaattttattataaatattaaatatcgtacccttaatatcaattgaattaaaatttaatataatttcattaattaattgaattttcaaattttgtgaaattttaacaattttatcaaatgatggataaacattatcattaattattaaattatcaaattccacaacagaaattggtgtttgattaaatattttaataaatgatatcattacttcattaagagattcaattgtaatacaattaaatttatcatcttttatatcatttaaatcatttatttcccaaatatttatatttgaataatttataatattattatgaaaattttcaataattaaataattttcaaaatttttaaaattaataaaatcatgtaataacatttgacaatttgaatgattttgttgtctaattttaaatgttttattagtagttgttaaaaaaggtgttgaattagatgatgatgattttaattgaaatttatttgaatttataccatattttaataataatttttcatttgttgtagatgaagattttaattcatttataaaagattttggtaattgaattaatttataattagttgatgtattagaaggtagattatttgttggattaagtattgaaaacacgtcagtcatttgtcaaaagaaaagagtatggtctaagtgattacttacgcgtcagtatttttcagtgatctttgaattgtatctcttttaataaagatcaaaatggaaaaactgataacgaataaaactccagcaattgttaacgtacaattttataagttatgtaaagttaataaagttgataaagatagtaattttatatctgagataaaaccaatatttattactattttatcagaattgttaaaaccattaaaggaagatgatgaaaatagatttaataattttttaaaaagattaattgaatattatttttcagaatatgattctactcatttatatgaaatggatcagattaaatatatttcattttttaaaactattattagaggtccaaatgtatcagagaagagaataataaagaatcattatggacattataaaacaaatagaaattatttacaacaaacattcaattatttccaaaaaaagtataattattcatcaggtaaagatgcattaacatttccaaatcaattaaatttcccaaaatttggtaaattaccaatgtcagtaaagaggaaaatgacattaaaggatgttaaaaaattaacacaagttgaaaagaaaggtaaaataggtagtatggaattaattcttaaactttcattaattatacataaatgtactcaattatatgaaactaatttattattaagttcatttaaagatcaacaacttaaggatattcaaaattattttaaaaataataatatttatgataatgaaattgaattagagataaattctagaaatgaaaaaaagaaggaagcaaaaaacaagaaataaacgttgaataggaataggaatacctaatcaatttatcagagttaataatacatcttaaacttcttttcttgatttttcatataaattatataaattatataatttacttaataatataatataatataaatctaatttttaatttttatttaagcttttcttgattttggtttagttgcattatttgaacttgtagttttagcagttgaaacaacaggatcaatgacttgtttctttgatttctttcccttctttaaataaacagaaatgtagaaagaaatgaataagaataaataagaagtaattataacataaccatagaaagccgcttgttgagtaccataacaatcacctaaatgaggtaaaataccatcaaaataaacatttgcataataagtataagtacaagtataaataaatgcaatatcaattaaaaattgtaaaatttgaaatcttgtaacccattgtttccaccaaactttaataccacaacttgaaaggaaataataaaaatacattagaacatgaacagctaaattaagtgaaataactacccattcaacagaagtatgaccaataatttgagtataacaaagaagtgcagttgcaccatgatgataagtatgtaagaataataatttttttcttcttaaaacaaggaaaactgtatcaaataattcaataaatttagttaaataatttagataataaagacaaactaatcttttagtgaaagcttcagatgaacaaactgaatgtaataaaccattataataccaaattgggaaaacttgttcaatcattaataataataaaattagagaaactgaagttaagaataaattatgtaattggaaaatgaaatttaatttaattggatttgaatttaatttatttaaaatgaattgaccaccgaaaataatgaaataataagcaattataattgaaattgcatgagggaaattagcaaggaaagttttataaggtataaaagtaaattcatcagctgaataattattattagtgaaataagtgaagaaatgattaaaaattggccataaatgaataccgaaagggtaatcaggagaaggttttgaccaaataatataatcaggtaatgaataagtcattatttaataaaaggaaggaagatagatagaatagatagaatagaagaattaaaagaataaaagtaaacattagaaaatgttagtaatggttgttgttgacatgtgttgaaaaatttaaaatagtgtgaaataaataaataaatggttggttaaattactattagcagggtcgatgggactgtcggcataatatactggcaattataccgagcacatcacgtgactgtatgtaatgtcacgtgaccatatcatttatatatcattacgtaataaagccgggtatagaaaacggctataaaaacggctataaaaaaataaaatttgtaaaaaccactcggctgtagtattataataataatagttattattattattattaatcagggcagtttaatttaataacctctaattattaacatcccatctattcccgaggctataatcttattaccttattttattttatgttatgttaataatcttatatatcaccacattgcaatgatctttaataactaatactctcatatactactttctcttcttttaataatctttcctaatgtcaaataatatacccttatcaaatgctgttaatttaaattcttatcctattatacctaatatttcaaatgattcaaaacaattcctattacctcctttaactaataattttttatataatttatcaaataacgttaataatactaataccaatatcaataatatcaataccaatatcaatatcaatccatcatcatcatcatctacatcttcattatcttctccaaatccatacattcatcaattaccacctttatttaaattaaatccaatacctcaaccattaattccatctattaataataatataactaaaactaataaaaaatctaaaaatttacctcgtaagaaaagggaatgtccaatatgtcataaattttattctaaccttacaactcataaaacaattcatattaaagattcaaaaccttttatttgttccaattgttcaagaccttttaaaagattaaatgatttaattagacatgaaaaatgtcatttatctaaaattggtgattgggaatttaaatgtccttattatcaaaaagatattaataataaagaaataaattcttgtcatcatacaggttattttacaagatgtgatacttataaaaatcatttaaaggcaattcattttaaatatcctccaaatactctaaaatgtaatagaattaatgtttcaggtaattgtagagaatgtggtcaattctttattaatgttaatgattggttaaataatcatatagagaataatcaatgcgcttcaatgaaaaaatagttcttctttatattataaaccttcttctttatatataccttctttttattttattttatttatttatagacataccaatgattaaatatattctgatactcatattcactttaattaattataaatatttccctctagtttatactttcagatttacttatattataattaaaaatctttattggaaaaaatttactaaaaataataaaatttcaattgaatcaacaagatatactaattgttcattatttgaatgtgatttctttggttttcataaatctaattcaacttatttcacagaattagacctttgtagaactcaatgtgtacttaattcaactaattattttattaataaattatctaataatgaatcaattccatttataccattagcttcaattcataattcattccttaaagaaattaaaccattacaaaattatcaaatgcatagtaaaattgtttccactagtgataaatgggtatatgttatgacattatttaccatcagtaatggtaatagcaatagtaataacagttatatctacaacaatcgacgcatcgccgccatttcaataggtaaattaattttaaaggataaaattaataaatcaactatttcaccatcagttttacaattaaattcaaatttatcaaatgaatctgatctactctctgttattgattcaatacctgatttaattaatatttataaatctatataaaattatctatatagtaatgacggaaggttataaaaatcctgcattagcaatgcttggtattaaatcaattaaattaccttcacgtaattggttaattttttggacagttttatcaggtttatcaggtggaattatttatgataaatggcaacaaagaattttaagaaatcaatatatggaaaaatttaataatcaaaatatttcttatcctgttgatcataaagttaggaaattaaaaattttcattgcaccaccaccaaatgattatcttgatgaaagtatgaaatattttagaagatttgtaaagccaattattaattcttcaggtttagattatgaattaattacaatggaaaggcaaggtgatataagatataaagttgctgaagaaattagacaaattagaagaaatctcataaagaaggatattccagaaatagtaccagaagtaacaaatgaaattacaccaattaccacccaagaaactaaatcagttagagatttatataatccaatggatttattaggtattgaaaaaattttcggtaattttaaggataaaaaaataattaatgatgattcaattgttaatgatgttagaaattcaggtggtattatatgtattggtcgtggtgcatataaagaatatattaatggtattcatgaaggtttattaggtccattagataaaccagaagtagaaaaaattgaaaaaattgaagaattagataaagataaagagaaagacacagaagattctgatgatgataaatatgcaccatcagcatttatatacgccaaggattattcaaatgctacatttgcacctgaatttggtattgatttaaatgataatattgataatatacgtaataaattacgtgataataatggtacaccatattttttcactcaaccaatacttgaactacgtaattataatacatcaggttttacaaaacaatttgaaagaatgtggagattttataataagagaaatcaattaattgaatataatgaaaatttatcaaaattaattaattgtaattattgtaattttacaaatgataaattaaatcaaggtattgaagaagaaaatgattggccttcaagttggttgaaaactgctaaaattaataatagtgaatgggttagagaatttaaaggtgatgatagaattatgaaaattttatcaagttataactgtaaataaaataatctgtatataaaatataatataaaatacttaattattcagttaaagctctaataactgcaggacgacgcatcattctctttgtccatttataaacttcaggaaattcaccctttaaatcaataccaattttatcaacaacataattccatggtacaaaacataaatctgcaactgtacatctatcaccaactaaccaaactggtgaatcaaaatatcttgattgacttaatggtgttaaccccattgaataactttcagcattttcactatctaattccattattaatgattctctacgttcacttaatgccatttctaatacaccataaactctacgaacttcatcagtatatctattaattgctgatggtaaattaattgaatggaaataacggaaatgtaatgcttgtccaatcattggtgcatgacctgaagtttgaaaaaataaccatgataaaatttgactttgttcaattaaattattactccaaatttcaatttcattattatctttattattagtaccactactattattaatttcatttaattcttgtaattttttattacataaataagttataattgaacctgattcccataatgatatttgattattattattattattagtattgatattatcacttcgtattctaacatttgaattaatatttgccctatgatcaattaatgcaggtactctaccatttggatttaattgtaaaaattgtggtaatctatgatcatttttattaaaatctaaatgaattgtttgatatttataatttaattcacttaaaataattgcaattttaaacccatttggagcactcctatgagtaattaatgaaaatccatcatttggtggtggattattgaaaaataaatttaattctgaaatattatttaaatcattatttaatggttcaacagtttcttcatttaaatgaatattacgaagtccagaagataaatttgagacatgtgggtcactacgaaatgtatccattatagtatacttgctgtaccaaagagaaaataaaagaagataaaataaaagaaaagaaatacaataatataataaacaataaattgacacattcattccccccccataattaaagtcatttgaaacgttgagaaaattcatgaaaaattgtttatgttggaaatgtggctttcttttctttgtagacctttgttttctttttggtaacggatgttggtctctctaatacgttcgttattagatgcttatgcatctcgtaaacagatatctcatttggagacatctcttaatccaataccaacttggaaattaattataaatcctcaaacatggaaatcaactccaaatttaataattttccattatttatttgtttcatttataatattatttgcaatgacaattactccattaattttaccaattaaattatttatcattcttacattaatttatataacaacagctccattatttgcacaatttttccgtaatggattaccaattttagcttgggttttccttttctttaattcaaaatttataccattagaaatgaagagaccaataagtgttaaagttttacctgcattagaaacaattttttatggtgataatttaagtgaaattttagcttcaaagacaaatactttcttagatattataagttggttaccttatggtataattcatttttcattaccattcgttgttgctgctttaattttcatttttgctcctccaaatactttaccacaattttgttggtcatttggatttatgaatttaactggtgtagttattcaaaatttaatattctcttgtgctccaccttggtataaagttttacatggtttagataaggcaaattattcaatgaagggatctcctggtggtttaggtagaattgatattttattaggtttagatttatatacaacaggatttactaattcacctcttatttttggtgcaatgccttcattacattcaggttgttcaacaatggatgctctttggttatcttaccttttccccaaatttactccattattcatattttatgtttgttggttatggttttcaacaatgtatttaactcatcattattttattgatgttgtagttggttcatgtcttgcattattctttttttcattaattaaatggagaggtaaattaccaattaatgatttattttgtagatggaattatgaaaatattaaatttaatgatatttggttagaagatccattaaaacaattagattattttaattatgataatatgaatgatttagaaatcgacttagatacaaataatgatttagaatctcaaatacctttaaatgatttatcaaatgataataataataataataataataataataataataataataataataataataataagaataagaataacgataatgataccgataataatgccgataatgaccataatgatgataaaaataaggataaaattgaaaatgataataattttattgaatttgaatctgatgatgaaattgctgaagctaatgatattgaaaaatcaatgcatacttcaataaagaaaactccaaaaatgtataaagaatcatttgaagcaacaatttcaaatccttcttcatcaaattcaaattcaaattcaaattcaagttcaaatcgtccacctactttataacaatatcttgatctatatacagaaattaattaaatttagaaagtttcaaataaaatacaaatgtaaacattacttaactactcttacctctaccacgtcccctacctcttcctctacctctaccaccacctcttccacctctagttttaccattacctctacctctagtacttccattcccattacctctttccatttcctcttggactcttttactctcttcttcccaccatctagcaaattcttcctctgctttgatatcttcaatagatttagtttcaataacttcattaataattactttttcaacactttttttacgtttcatttcatctaatgatgggaaatgaactccagttaattttttcggtgcaattattgttgctgtacttatctctaataaatcatttgaattaccttcaataacttttggtgttgtattaccccatgcattattaggtgtccaagttctcctattctccttctccaactctcgttcacgttccttttgttctttctccttttctttctcctctcgttctttttgtaatctttccttttgtgaaagtcttggagttagtttgattttgacagattttttactcgatgtggttggtataattaatgatggtgatggtgctgatgatggtattgaagttgaggatgctgtcattggatttggtatgattgatattggtgttgttggtggagttggtaatttattaataatcggtctagatgtcttaacactcgacctacgtcgttgaacaacaataaattcattagaatcaccttcttcaattgcattttcattattattaatattattaactatttcaggttcaattttagttagtggtaatggtttagaaatttgagatttcctacgtgttgttaaactttcatgtttagaaattgtctctttagaaacaccttcaactgaccaaagatatggatgtaaataatattcattatatgagtcagtaaatatagttcccatattggacctctttttcaatttacgttttggtaaataaatataaattaattctttgattcttaaatcaattaatttcatacattcatcacttaaatttgaattatttattcttgaatctttataagtaattggtaaattattgaaaatataccaaacacaattagagaataattgtttagaacttgaaataaatgcatgttgtaatattatatcataattttcaaaattaatacaatctttaattgctaattcacataaatgttttaattctggaattaataattcattagataaatagattaagtcagtcatatcattaataaaatcatcaactgtgtctttacctttgatgagttccttaacatttgaataaaaaatatcgtcgttatattcaccttggaaatatttcattaataaattccatgtagtttctttaacatgactaaaatcaactatatcaatttccatccaattattactaaacaattgtttaaaataatcacatcttgcaattaataaaaatttccaagtctttatttcaacattattagctaatttaactgtaatatcacctccattaagtttgttcatacattcaaaaaatggaattttaggaaatgtatataataatctatcccatcctgttttaatagttggatctgtaataccattattccaaacatccaatatctcatcattgtataacatattaataaatattacaacactacgtatatccatttcaccaattataaacccatcattttcattaaattcaaaagttaaatttttacgatctaaatgaaatttttcacgttcaatatttaatctattaaataaaattgctttatgaacattaattgtagttttcatattagttgttgtattttcaatgtaaatttgataatcataacatttattgaataaacaattatttgataaataatcacataatgtttcttcaaaatggaaatagtcataaatcaatggattatgttgataagcaaatggtgttattcttttagtgaaaactaatccattctctatatcatcatcatcatcatcaccttcatcatcactattattatcatcataatcttcttcaatataatcatgctctaatctatttgataagaaattagtatcatattctaggccactattaatattttttccatcaagtggtgatagggaaccaatatctgaaatgattgaagaactagtaattttatgttttaaagaatcattttcctttcttaataagactattttatttttagaatcaccattagagataccaaatccaatagaaactgagtaaatattggaaacatcattaatcctaacccatttagtctttgtacgtttaaatgcttcaccacttttagtacataatactgcaccaattgcaccattaattaattcaccaattgagaaatcaattgcattcatttctcctcttgaaggtttccaaactgttgaaaatttcaagtgacttttaaagacatccttagagattgtatattttggaaatgtaaatagtaaaatttcaccagtatttaataataagaaaactgaataattaccattcatattacctgaatcttttgaattattaattgatggtttaattattttaattattttacgtggtgaacttaatattcttggtttaaaagtattccaattattactaatatcagtatttgaaggtaatgaaattttcaaatgttggcctgaaatataaatatgaattaaatttgaatttgtaacaattaaagttgcaacatctaatgctaaaacaaatttaattacatcatcaggatatttccatgtaaaatgtgcgcttattgatttggatgaattatcagaggtatgtattgcattagttaatggaccaaattgtcctaaatttaaaccatagatatgaagtgaatgtggagaatatacaactgtatgattatctgatgatgaaacacctataatttgagaagtattggatttagttgaatcatcaatggataatctagtatttgatcttgaagataatgataaagcactaaagttattagtaatcatattcgatgatgtcagtgaggaggcagatgatggagttgtaacagtattggaaatagatgatgattgtttaataattatttgaatcggtattaatgaattcaaatcttttgaatgaggtgaagaaattgttgttgaagatacattttgatataaattaagtctttgaatattaataccaaatgcataagctttattaaatgatgtaattataactgtatgaccattattaattgatgcatctataactttttcacctcttaaaaataaatcatcaaagaatttaattcttgagaaaagtgcagtttttttaataatatgtaatgggttagttatgtataattgacctgatgaagtgattatgatagaatgtgatgaagttgaaataaattttgaaattttgaaatttagtaatggatttttggaaggtaatggtgataataaattttgataaattggtatgttaataaaatcgccacttgattgtgatacaattaatgaagatgtgtggttataattatgattatgatgactaccattatcaagtttttgaaattcaccattactatcaatggaattaaccgagttatcaaatgaggttagatatgaaaataataaatcataaggaatttgcttattcttgtctttatgattcagtaatttagtttgtaatggagtattgaatttaagtaataaattagcaaatgtaaaattaaaataatatatagcataatgtaatacattccaatgattttctatatcatcaataagcaaacaattatgtaaatcttgattattatttaaatattttaaaattctctttaaattataaatatcattattaattgctaaaatatgaagtaatgatctaccgaaaatatctctcttaaatagagtttcagatgaaataattattgaattatcaattgtgttattaatttgttgtgtattattcttagtaaaaccaaaagtatccccccttttggtcttattctttgatctattattgggtattgcggtagtgaattttaaaacatcattgggacggttttccgagctgttaatatgagtaatcgaatgaataatgtaggttattagaaaggtttgttatcagactaagtggggatagtgtccaatttgcagaaagaggtgttaatacctaagaattaggacaaatactaaagaagaaagtacataaaagtagttaattttgaaataatgaatgaaaatgcacgttgagaagaaagtgaaaatatttgaattttcatgctttcaataatctattatatactaggacattatttcattatttattggacaagagagatgtcttttttcatagataacaatagtgtagcaccacagggtgtgtcaagtcaacgtatggaacttgcagagtttcaatttgatgcattaaatgggttattagcaactattcgacgtagttgtggaggtaaatgtattccattagattatggagagaatgatcttacaaagggtgaaagtgaatgtactaatagatgtgttgctaaatttatgcaagcacatcaaactgtggcaattcatgttgaaagaaatcatccaataactgataaagatctaattcattatgaacatattaagaaagagtatctcagtggtagtgaagatacttcaactaaatcttcctcttaattataattatattggttaaatcttgtaaatatatagcttatgtattactttatacgtataatacacattaatacacttagtgaatatgatttatgtgtccaataaggtcttacaacgcgttaaatggatgtgtttgtaagtacttagtatatagacatgcatacaattaatggataaaaatatttattacaactgtttgtttatttgaaggctgttttttttcttttatctgttggttctttgtatattaaacactgcatacatacatcatagatgaccatggatcaatcagtcaatgactcagtcagtgaatcggttaatgaaccagtcaatgaattagtaaaggaaccagttgaggaactagctacagaatcaaatcacgctttaattcatttacctgatagtgcaacaattaataacaatgaatcacatgaacatagattgaaaagattccttttagatagtgatccattaactgaatataaaaaacatggatctgatgatgctgctaaacgtttccaatatttactttcattatcaccattatttcgtcattttattgatattaaatcaacaaatgataaatcattacataaattaattagacaaattgatcaaaaaaatgctacaagtaataaattatcattatctacttcttcatcacgtcgtaagaggaaatctgagaaggaagaagatgcagaacttttaaataatgaagaagaagaaattaatgaatcaactacaagtttcttaaatgaaagtcctaattatattgatggtaaattacgtgattatcaagttcaaggattaaattggcttatctctctttataagaatagattatcaggtattttagcagatgaaatgggattgggtaaaacattacaaacaatttcatttcttggttatttacgttattatgaaaaaattgatggtccattcttagttattgtaccaaaatcaacattagataattggcgtagagaatttgctaaatggacaaaagatgttaatgttgtagttttacaaggtgataaagatgaacgtaataatataattaataatatattattaaaggcaaattttgatgtttgtattacaagttttgaaatgattattagagaaaaatcaagattatctaaatttcgttggcaatatatggtaattgatgaagctcatagaattaaaaatgaacaatcatctctctcacaaatcattagattattttattcaaagaatagacttttaattactggtacccctttacaaaataatttacatgaattatgggcattattaaattttcttttacctgatgttttcggtgataatgaaattttcaatgaatggtttgaaagagagaataaaggtaatgatgaagaaaatggaaatggaaatgaaaatgatgataaaggtaaagaagcagttgataaattaagaaagattttatcaccatttctattaagaagaattaagagtgatgttgagaaaagtttactacctaaaattgaaacaaatgtttatattggtatgactgcaatgcaattaaaatggtatagaaatttattacaaaaggatattgaagcagttaatggacaagttggtaaaagagaaggtaaaacaagattattaaatattgtaatgcaattaagaaaatgttgtaatcatccatatttatttgatggggctgaacctggtccaccatatactaatgatgaacatttagttttcaattctgcaaagatgattgtacttgataaattattaaagaaattgaaaaatgaaggttcaagagttttaattttttcacaaatgagtagattattagatattttagaagattattgttatttacgtgattatgaatattgtagaattgatggatcaactaatcatgaggaaagaattagtgcaattgatgattataataaggaaggtagtgataaatttttatttttattaacaactagagctggtggtttaggtatcaatttaacaactgctgatgttgttattttatttgattcagattggaatccacaagctgatttacaagcaatggatagagcacatagaattggacaaaagaaacaagttaaagtttatagatttataacagagaatgcaattgaggaaaaagttttagagagagcagcacaaaaattaagattagatcaattagttattcaacaaggtagaaatgatgaaaagaaagaaaatcaatcaaataataaggatgatttattaaatatgattcaacatggtgcacaaaaagttttagatactgatggtgaaggatcaaaagatttaaatgatgatattgatgaaattttaagaaggggtgaagaaaagacaaaggaattaaaggaaaaatttgaaaaattaggattagatgatattcaaaattttaatggagaacagcaatcaacatatgaatggaatggtgaaaattttgcaaagaagaaatctaaaggtttaggaattttccttaatccatctaaacgtataagaaaagaacaacaatatagtgttgatgaatattataaggatgttatgaatcaaatgaaggttcaaccaaatgttaaaaatgttatacctagaccaccaaagcaatttcaattagttgatttccaatttttcaatcctaaattaaatgagatgtttgaaaatgaaatgttatcatataggaaaagaattaattataaattaggtgaagaagatttagatttagagaataaaaaatatgataattttgattatgaagaatatttgaaattaagtaagaaagaacagaaaaatattttaaaggaattaattaatcaagaacaagaaaagatttacaatagtaaagaattaagtgaagatgatattaaattaaaggatgaattaattgctgaaggttttggagattggaatagaagagaatttatgcaatttattcatggatgtgccaaatatggatcaaagaattatgcagagataagtaatgatgttaagggtaagaatgaggaagatgtacgtaaatatagtgaagtattttggcaaaaatataaggaaattgaaggatgggaaagatatttaaaagaaattgaatttggagaacgtaaacttgaaagaattaagatgcaaagtgagatattaaagagtaaaattaatgaagttgaaaatcctattgaagaattaaatataatgtatccaccaaataattcaaagagaatgtattcaattattgaagatagatatttattaattaaggcagatgaatatggattattaaatccatatgtatatgatttaattaagagagatataataaatgaggaaatgtttagatattgtttttatttcaaatcacgtacagctaatgaaatatcaagaagaatagttacattattacttgcagtttcaagagaagttgaaggacctgatgcatttaagagaaagagaaaaaatggtattattaaaaataatgaaaatgatagtgataatatgagtcgaccagatagtattgatcctgagagtggagaagcgaatgaagatatgaatggagatgtaaagaggaggaaaattgaggacattagtgtataatacagtttgtaatacagtttataattgtaagaaatagatctaaatacagaaatagaaatagataagataagataagataagataaaatggatagacgcgccgatgctgacataatcatagaagctaccgacgtatcgacccaaagtagaaaatagaaaataaaaatttgcttatttttgctctctctttatttgttgagaaaatgcaatgctttcaaagaggggaaatactgacattgacgaatagagcgttttcaatttaattttacatgattttatgtgatttaaggtatttatcttttgaaattttgcctttcattttacacatcaactgcttgctttagcctgcttagattcatttggttttcgtatattcggtactctttctcattgatcaaaccgtttttcgtagttttcatttaatacttagaatttaaattattaaaaaataaaaaatacaaaagaatatactacaattaggatataatataatctaatctatagaaaatcaattgaatatactatataaatataaataatagatattattgcagattaaaacaaacaaaagaataaataaatacttataataaacaatgttaagatcatttaataaattatcaataactaaatcagttgtaagacaagcaactagaaatttctctaaatgtcaaattattaaagatgaagtctcacttaaaattgatggtattccagtttcaattgaaaaaggttcatcaattattcaagctgctgaaaaggcaggtgtctatattccaagatattgttatcatgatagattatcagttgcaggtaattgtagaatgtgtttagttgaaattgaaaaatctccaaaaatggcagctgcttgttcaatgcctgttggtccaaatatgtcagttattactcaatctgataaagttaaaaaagttagagaaggtataactgaatttttactttcaaatcatcctttagattgtcctgtttgtgatcaaggtggtgaatgtgatttacaagaacaaactttaaaatatggttctgatcgtggtagatttaatgaagttacaggtaaaagagctgttgaaaataaagcaattggtcctttagttaaaacttcaatgaatagatgtattcattgtacaagatgtgttagattcttaaatgatgttgcaggtgctcctgaattcggtactgcaggtagaggtaatgatttacaaattggtacttatgttgaaagaaatattaattctgaattatctggtaatattgttgatttatgtccagttggtgctttaacttcaaaaccttatgcatttaaggcaagaccttgggaattaaagagaactgaatcaattgatgttatggatgctttaggttcagcaattagaattgatgcaagaggtatggaagttatgagaattttaccaagattaaatgaagaaattaatcaagaatggatttcagatagatcaagatattcttgtgatgctttaaaagttcaaagattaactaaacctttaattaaacaaggtaataaatttattgatgctacatgggatagtgcattaactaaaattactgaatcaattaaaaaaattaatccatctaaaaatgaaattaaagcaattgcaggtcctttagtcgatgttgaaggtatggttgcattaaaggatttagttaatagattagattctgaaaatttaacaattgatgcaccaattaatgaaattccttcaattgatattagatcaaattatattttcaattcaactattgatggtattgaagaagctgatcaaattttaattattggttcaaatccaagacatgaggctgcagttctaaattcaagaattagaggtagatggttagaaagtgatgatgttgaaattcatcatattggtgaatcatttgattcaacttttgaaattaattcattaggtaaaaatgcaaatgatttacaaaaagcattaaatggtaaattaggtgaaaaattatcaaatgcaaagaaacctttaataattgttggttcaggtgtttatgaaaataatgattcaattgcaattgattcaattttaaagaaatttattaatggtaaagaaaatattattaattcagaatggaatggattaaattatttacaacgtcaagcttcaagagctggtgcttttgatattggtttctataattcagatccaaaaattcaatcaattgaaccaaaagttgttttcttatttggtgcagatgaaattgaaccaaaatcaattccaaaagattcatttgttgtctatgttggtcatcatggtgatattggtgcttcattagctgatgttgtattacctggtactgcatatactgaaaaatcagcaatttatgttaatactgaaggtagatcacaaatgacaactgctgcaactggtccagttggtgcatcaagagatgattggacaattttcaaagcactttctgaatatttaggtgttggtttaccatatgaagatattagatcattacgttcaagaattgaaacaattgctccacatcttgtaaggattgaatcagttgaatcagtttcaccagaaatcgttaaactttcaattaattcaacaaaagatattaaaccaactggttccgatttagttaatccaattaagaatttctattttactgatgttatttcaagaaattcaaagacaatggctcaatgtgttggttcatttggcccaactatcgaaaaggttaatgatgaaaatgctcatcaatatttaggtttggcttaaattgaataatacaatttaattttaacttattaatatttataaacctgtgcttttagtttttcctccttattcatatacattattattatattaaaatatttattttcttgtttaacgattaaaatttcatccccccctctcttaacatatcttaatagttaacaacaattagttaaattttttatattgattatttattattcacttctattaaaattttataaaaattatttatactataaactaaattataaactattttattttatatctaaatcattaaatattgcttcggagccatgatcatgaatacaatttaaaagccatcttgaaactttattaacacctttctttttacttgcctcaatacaacttgcaatagttatattattaacttttaatgttgttctaaaaactggtaatatacttttagttgtagtatcttgttcaactgtgaattgtggtataacatgtctattaccaaacaattgaattaattcatttttagaattactacttatattattgagttcatcacttggaatagaatatggtacttttaaatatttgaaagttttaggtgttttcttaacctcggtgggttgtttaacttcttctattttttcagtagtattattgtccttattaatatctttattatctatactattcttattgtctattgattcaaattttttactaacgacagattctgttcttggtgtcatcattctaattaaatgatacttttcaattaattttttatttaataatgaagcttgtgcagctctagcacttgcatcttttaaatttctaccttcaccataacctaaaatttctccacctatactacattcaacaactgttggagtttctggggtaatttgcttttgaatacatttatattcaggatgtaattcagctgatccaattaatgcatataattcaggttttgctaatttattaacttcatctgatgacgttaatcttatcgggaatttggtattttctggtagtgtattattaggtggcggagttggtaatgatggtattttaggtaattgaactgatgggattgcaattttactagctgtggatgatgatgtggataatgatgtagatgatgatgatgatatttttgtgttatttttcaaaaatttagcaatcaagtttttacttaaatgactataagttaatttatctgattgttcaaattcatcaagaattggtttataaacatccattaaccaagatttgatgaaattatatgcgtctccatttctacctttatcgatgaaaattgcaccaatatatgcttcaaataaatctgcaattcttttattgttcttgaattttgaatttatatccagttcagttttaattaaatgagactttaataattcttgttgccattcagggaacttataagctcttgaaatgatttcaattgtttcatttttaactaatgtagatcttaataacgttaattgaccttcatcaaatgaaggatatttcgattcaattatatcagatactatagtttctaaaactgcatcacctaaaaattccaatctttcattatttgattgaacttgatctaatttggatgaatgtaaatttgaatttgttgcagatttatgaatgaaaacttttgattccaaaattgaatcataaataacgggtaatttaggtaatatggaatgatagtttatatcatcttcttccttttgggaattatactgttcttgccttttctctttaattaataactggacatcatcaacggaatctaatactgtattatcattaaaattgattatttgattaaatattggtaacttattatcatcatataatgatttaatttgacttgcaagttgaattttatgagattttgctaaaagtaaaacttttgctgcaacttcaccattttgtgaagaatctttatcaagagattgttgtactaaactgtttatgtaatttttcaattctgttgcatttggtgatgtctctattaattttttcaaattttcttgaataagtgaaatagaatgttcaatggatatcagatcatgaattgcaaaattacggaagtttgttgattgttctggttctactgtggtgtcttccttcttatcttctttcttcttctctttcttatcctttctatcctttttatctttcttgtctttcttcttttcctttctctcagatttgtgtcttttcaaattactattttcatgatcatctatctcatgcgttcttttacccatggtttctatataatacggtaaactctacacaaaacagaccaatactgtcaccaactttaaatgaaaaatcatcacaataatttttgaaaagaaaaaaaaattatttttttgtgtgggtgctgcacagccttttaaaatcacctattattgtagttgttattatacctgtaagaggtggtcttggaaccgaatatactctggtcattggtattctgttgagtgtgaagcactcggtagagatgttgtggcgtattggattgacgtggagtaggattgtattgggattgtaatggtgttgaggaatgcccgattttactaactaaaacatcacctttagatggttcgtatgctgtattagtatcaatatcatccttagtattagaattagtggtagtattaatatctttatctagatcattcactacttcaccccaatatcgttttctttgaattgtaggttgtgcattttgtgcagtttgattatttttgttattcattgattcagtataacattcaccaaattttaataaatgaggtttcttttgatatttaaagaatgcatcatataatctatcataatctaaatccaattgtcccaccttaggttgaattctttctcttgtcctttgtttcaaagttgtcgattctccactatcaactggatcaacagttggtctcatttcagatatacctgtatcactgataaatttaggtaattcaaacggtggtctctccacacctcttttcatagataagaaactcttcttagatctccaatgttgtggtactggaacagaatctggtaatgtttttaagtaaatatgtaatcttggatcttcagcatctgcatcaatccattcaactagttctggatgaatagtttcacttttaagaacgtataatggaataccatatttctttttaaactgtcgtttactaagtgattgtggatttgattctttagagtctttatctttattctcttcatcatctgaatcatttattttatcattttcacctttattatctcgatgaactaactgtttctgttcaacattttcattttctttctcctcctcctctacatcaatttccttttcctttggttcaaacttctccaacacatccttatataattctgcaaacggttcatcaacaggtgtttcttccacaacaactatatcatcatcatcattattattattatcttctttagttttcttaacttctactactttctttccattggatttctcctgttgtttcaataatttcgccctctctcttctcaactggttctttgacttcttagtcaccaccggattatctatctttgatcccatccttgtctagtagtacaatatgaaaaaaaagcagtgtcttcccatagtaaaacttaaaaattcttcaaagcgctgttttcttcaatgagccttaaatggttttccttgatttattgttgccactgttttttcctttactttttacttattttcactattcgaccatgtctgaacttaagaagagaccctctgttactgaagatcttaagattaaaacaattccaacacctaattcagcaattaataaatcgttgaaggaaatacaggaaaatcacgaatctaatgaaaattcaccaatatcgccaacaacaggtataattccaacacctagatctgcaatatcatccaatggaccaacatctgctgccaattcagtgaagaaacaaaatgagaaaacattgggtgaaatgacacaggatattaaggctcaattgagtaaagcatcagaggagattgagagagcagatgcagagtttcaacgattgttaggtaatttagagaagaaagttgcagctttaagggttaatctgaatgcatcaaagtgattatatgatgatgatatgatacgatttggaatcataaaataattttacaatatagtttacaattcaaaatacagaaactaaaacttaaacacactaattataataacaataatgaataactacatgacaatgctcaaacacagacaactacctattatcatacaagttaaaacaccacaagatatacaatatacaacatccaccacagaaaaggcctcttctcctattactacgtgtaacaaacgcgttgtttttcttattttcagtttacactctattttcgattctctatttttcactttcttttctttttcactgtatctttacctctatttctaagtctcattagttaagaagtctgtcactttctattctcttactaatataatgcttatgctggagtttgcagtattctccaaaaatttgaataaaaatctgttaccaacagatctacaactaacatcagttagtcaaacgacgagaataaataatttaacaaaatttaaacgattgttaaatacaattacaactgataataatactaaaaacaatgaaataataccgaaacctataaagcaagagaagggtaaacgacctagaggaagaccgagaaagcaaattgatacatcatctgtattattgcacaataattcaaatttattagataaatttagaaattttgaaacttatttacaatatgcaaaatttaagcaactacaaacaaatactggtgttttcatgggtaatttatatgaactgcaagttaaaagttttttagagaaacaatttaaaattcaaagtacattacatcaaggtggtagtaatgataaaggtattgatattaatgcaatttggaatccaatgaatattttgaaaactgagaaaacagataaagatggtattagtaataatattgatgataatgataataagaaatatgaaatagttaatatgaaaaaaatcaaacctttggcaaaaagaagtaatcaaacgattaaattatttgttcaatgtaaatgttataaattatctaaaattgatccaaaattgataagagagattaagggatcatcacaggaatattttaagaaaaatgggaattcagctattttcatgattgcatcaactaatggatttacaagagttggtagggaagattttgataaggcaactataccattaatgtatgcaaaatttactaaacctaaattaattaacaaaagatatccctttgaaattgatagttgggaaataggtaaattagatggtgtatatttaaatcctttagccactgcgatgtttaaaggactggattggatatcgtttatgaataaattaaaatcattaaaataactaagagatgtaatattatgtataattaggataaaaaacataaataaagtaattaaaggaaataatataaaatttataaaagaacaattatttattattattcattagttctttctttcaggaatatttgaaccaattttaacttcaggaatttcatcaattttatcaagccattgacaaattcttgggaaattttctaattcaggtaatcttctaaaatttaaccaaggaaatgaagcaatatcagcaatacttaaatgatcaccaactaaataacctgtcttatttctagttaatctttcctctaagacacctaataatctaattgtttctttatgatatctttcaattgcaaattcatccttttgaggtgcataatatgaaaaccaatggaattgacccttcattggacctaaacctgccatttggaaaaataaccattcaatcatttcataatattcagctgaaccatgtttataagaatatttaaaatctttatcaaatttatcaactaagaacattaaaattgcacctgattcattaatatgagtaacttcacccttttcatcaacataagttaatgaaggaattctaccattaggattaaattttaaataccaatcttccttacattctgattttgataaatcaattggtctaacataataatctaattttaataattctaataaaattgtaatttttaaaccattcggagttggtgatgtgtataatttaatatatggagcaattaatccaccactctttggatcattttcggaaataatgtagtgtaccattgtaagttaagtattttctatgacaattgagctatcaaacagacctggaagtagaaaagaaagataagaagcagcatatataataaagattagtaattaaatccacttcggatggaaaggtccttttatacccgtagaagaaaattcccagaaaatttaaagtgtggctacatattaatatgaaattattattataaattagatagtattatcgtataattattaactccggagaacaatggagtttgtgttgaccgttgcagagacaaacaggttgagagaacaggtggggttgaagttgatccccgataatgggagtagtaatgggaaaggaaataggaaacacgggaaaggtgatggtaataatatgattaattcattgagtattgcagaaactaataaattacgagcaaagttaggattgaaattaatacctgatgaatctaatattgataaagaatttaataattttgaagagttagagacaagaaagagacaaggtgaaaaattagttaaattagttgatgatattgaaacacagaaacaacaattaaaactaaagaataggatagagagaggtggtattattgacagattggataaatcttccaatgatggatcgaatggtgatttagatttagattcttggttgagtaaagtaggtggagaaatcaaacgtggagttaatgctaagagattagttttcaaaaatgataaaaaatctaagaaaatagaaacagagttgaaggaagaagacatacctgatgttaagatatcacatgataatgaaaaaattaatgaaatgattgaaaatggtaatgaagttgtgcttacattaaaagatagtaatgttttagatgataaagatgaagatgaattagttaatcaacaattacaacatgaggaggaaatacttcgaaataataaggagaaaagtaaattagggaagttagtaacattagatgatcatgcagatgcaaatgacaagaaacgtaaactagaatctttagaaattgaatcagatgatgatgatgatgatgatgatgatattttacatttgaattatgatgagaatctagatggtgaaaagaaaatcaataagataatgaaacgtgatttttctaaattcaaaaaacctaagaaatctaagagttctaatgttcaaacgagaaaacgtattattgatgaagaactagaagaaagggaattcaagccagtgatattaaatgatgatgatgatgatgttagtagtagtataattgaagatgatttggagaaagtacttaatgaaagtagaaaattaaaatcaaaactaaaattaaacctgaaagaaattgttaatgatgatgtaaataaggaaaataaatcaattaatagtataagtgaaagtttagaatttttagataacatcaaagtagatgaagaaatcgaagaatcagttactaaagataatgaagaacaaaatggtaatggattattgagggataatttaaaacctgagactgaatcacgttatagaacaatattggatgatgaagaaaataaatttaataataataacaaatttggtatttcatctgttttacaatcattaaaaagtaatagtagtagtaaaaataataatggtaaacttggcagcagtaagtcagatgatgttaagattgtttatactgatgatgatggtaatgttcttgatactaaacaagcattcaaatatatgtcacataaattccatggatctaaaaagaaataatatttgtgtaactttacaaaatagcttttttttcaattttttttaatattacaaacagaaaatacaaaataaaaaaggtaaataaatataaaatgtagggtataagttagtttaaatattagactttagagacaattaaattttccagaattaaattgtgtctattagctttaatctcttgagcttcacgcttaatttcattggcatctctattttgtctcttattcttatgtttatcaaaacaatgtctaaaataagaaatcaggcaattgttcagattatctgcatgaacatcaactgagagattacatgtattaccacaaattccacaaactgcaactaaaccttttgcagttttaccaaaaactggaattggcatttcattaccagtagtgtaaacaccatgatctttacaaacatggtgcatatatgaggaatcatcaacgccatgaaatatagtgtttaaatccatacctttagtgtaaggacaataagggcataaattttgtgtaattggcttctttgtaccattcttcttatatctgataacaagtggttgataaaagttttgcttttgattacaccatctcagagaaatgtaatcatcaaaagcacgtcttttattaactttatatttccaaccatcttcatcttgaaaattttcaaaatcactaatatcgacatagtttggcagtaatgaagcaacaacatttcttttaatgattgatgtatcaatagcataaccaccaactgctttcataatttggctttcattagtagctaaatttttgaaagctggattagaaataataacttcccaatatctatctgctctatcatatgagagacttgtataaacaggcataactcttttgattgtaactttatgtggtttatttgcaaagctttcttgggttaaatttctttgtggaacatcaataactgtttcggagacagaagtttctgtgatcatttcagtagaaacaacatattggggaacgttttgtggaaccaattctaattgagacatattgattgatgttgatggataatcaatatcagtaacattgttattattggtattgttaaaaatagcttcaacgtcaaaattatcaagaatattttgaagttcttcttcagagaggattaatgaattttcattagttggtaatgataaaggttgttctaattcagcttgaacttgagcatcaacaacctcaggttgttggttaaataataattcagaaacatcatctgttggttcaatgacagtttcattttcatcaaggaaagcaattgcttggtctaaatcaagttcatttaaaccagtttccatagtgtaaaaatcatcatttggagtaaatgtagtttcagcaagatcaaagtttaaatattcagattcatctaaacctgcattaatatcaatgatagctgcagttaaatcagtggtagtattattggtagattcagaaacgttaacattctccgtttcttcgtctttttcttcctttacaggttcttcgagctcttcacaaagttcatcaatataagcgatttcatcaagtgttaaatcatcatcagttgatgagcttgtgttttcaaaagtagtagtagtagtagtatctttaaataaagattcttcaaataaataattgagtgattcatcatcagaggaaacaaaaatagtggaagacattttaaaataaaaaaattcaaacaaaagcaaaatttaatagcaagctaacaaaaaaagcaaataattgggaaattcagcaatgaacaaaaaatcaatgaaataaaaatataagcaaaaggcgaaaatgcaattgctattaaggcggtcagtgaaacgagaggtttaactgctaaaagaagagaaagaaagaagtgaaagataaatgttaaaattaaaatccttaaaagtgaaaaagctgtctccttttatagtttttcaaatactaacaaaaactgtaataactgatatttctgaataattgtgaaatttgttagtgaaaatagctttataatacaaaaaaatgatttcgcttcctaattgggaaaaccaaattgcctatttgggtaaattggtcattttttgtgtcatgtcttctgttatttgaggtatatttctaattaattaatgcattaaagttgcctaaaacggtaatagatgcatctagatcaattcaacttgcatatttccatggttcaaataccttctagaaacaattttatgcatgtttgatgcatatcaagaggtaattctaaattttctgcctttttttcttcttggaaaagtaaacaaactcgtaaataaggtgaattaattgaaataaaaaagtctggtacttgttctttttttctttaaatagtggctagactgaaatgaggagaactttgaaagaatataagtaattaaataaggtagcaaaaatgaaagcaaatactagcaacattaatttaacataaatagcaataaaaagtaaacgattaaagttaagatttataagttttaagcacttttttaattatatacaatattattgaagttaaagaaatgattaatttgggaaattaatggttaataccggagttttgaaatagcaaattttggttaatttttttgaaattaaaaaaagcattttttcatgttaatattactaaatgaagtattaaaataaaagaaaaagttttttaaagctttactggattacagacattaataaaatttgaataaatcaatactaaaatacaaaacttttagcttttgttgtttacgtaatcatgcacaataattttagaactagcaatactttttgaaaacacataactgggcgtgtggcgtagttggtagcgcgttcgccttgcaagcgaaaggtcatcggttcgactccggtctcgtccaatatattttttaatctttattttttcacatggggaatattataattagaaagggatgggttttaaaactatttaaaagaaagaagattgccacttttattaatttatttttatcttacttttgctcttccttttcagcattaccggatatgttgtgtattatatagagattatataaaccataagtaatagtatatttataaataaattttattgtataataatataaaggacattttttattattttcattttcaatttcattttaaatttcattttattaagggtattgtgtatgttaatggtataaatatattatattatattatattatattatattatattatgacatatattcatcataatcatcatctaaatctgaatcacaatcataatcaaaattagctgcacatgaacttgttggattattataataagatgtattaatatttgaactactactactattattataattaatatttgaataaccattaatcatataagattcaatttcatttgaaggtgaagtatccattgaaatactaccaagatataatttataaccatcaattccacaatctctttgatttaaatcaaatgttgaatttttttcaattgttctatgaactatattattatcacttaaaaaagttctaatattaccaattggtgtaaattgtattataccaccatctggatgattaaattttggatattcatttaaatctatattatctaaattaagttgatcttgtgggatattattagtggtattactaccattattataattaccattaaattgtttaacttttttaaattcattctctgattctgaatttcttcttttacatctaacatttctatgattaaaatgtaatggagatgagttagcactattggatccattctccatcaatttttgacgattggtatagtacatcgcaggtaatggagatgaatttatgttcatatttctgttatgatgggtcatattgttagtattatgattgttagtattatgattgttagcactattattattattattattattattattattattattggcaactacagttggagagatattaccagtaatatacggatctcctatagtcattataatatatgtaattatccctagtaaaagaacaaagataaagtaaaataaaataagataaaataagataaagtaagataatttttcacaattaattaagtgaaaatctcagttcatgaaaaatttgaatttttgactttcatgtcgtctgcagaagatctttttattaatttgatttaatttaccttatcatatcttctttctcttcttctgagatcaatggatctatctaatctctcgactaacctcccactctccactaaacccacagaggaagcatttgatgcaatcaataaggaactttcagatgagtttaaagtaggggctcgttcaattgctgcattatatagactttcaaatactaaaaactcattacttatagcaaaaggttaccttaattcaattaatgatatttcaaatctattagataatggtaatatatcctcattggatgatttacgtcagtttttacataataaaaaattagaattatctccaaatgaatcattaaatgaaagcactacaactaccattaacaatcaagaaaggcaaatatcctcatccccatcaccttcagtaccatccaataatacatcttcttcttcacaattaccgcaatcccaatctttacaaataataggtcaacatcatgattttactataaataatccaactaatcatcatttcccattatctcgtactccaatgtcaattgataatactcatttaaaatattatcattcaaaatcaaaatcaaataaattaaattcatcaacaataacatcatcaaatcagtgtaatatatctgcagaaaataccaactctaataatttaatcaatatgaacataaataatcatcaaagtatagattctaattcaaataaacatttagataattcaagtgatgataatgtagagaataatgatgataatgatgattttgatgatatttcatttgatacaatgtcagatacttcatttttgaaaagaaaattgaataatgtttcaactatatcaaagaaacaaaaattcaatcaataaaattaattattacttaatacatagttctaaatatcgaacatgtcataatactattctaaattaataaatatcttttttatattattataatataaatacacttttctaataattatataattctatttctattcatatttatatttataccttacctataatctatcaactaacattgattgtgctgccataaatttctttttgatattaccaactttatcttgttgcattctctcactaaatattaaccttattaaattcttccaatcttcttcactaaattgtttatttttcagttttaaattttcaaaattacttaaaaatttctctcccatactaccaattgtaaaatattcaatagaattatgtataatctccgtatttatattattactactattatcaatttcattatcaatatttttaataacttgttgtaaaactcttaaattaacaatcattttattccatccatttttacccataactgatattctacgactttcaaatataactaatttatcaatccaaaatcctaatcctccaaatattctaattttaacttcacttttccttttattaataatattttcactaactttattgaaaattctatttatattattaatcctttcacaaaatttatcaatctctaaatcaacactttcatcaccaataatttgccattgtttattaatcatcatttgaattatactccaaacacattcaagtcgaatttcatatctaattaaaatttcaacttcattcattaaaaattgtaaattttcaataattttattgaattttccattcatttcagaattaagtgctaaatatcctctattttcaaaattatcttcaaaattattactaataacattactattatcattaattatttcattatcatcattatcattatcaatatattcattgaaatttaaattaatattagatatttgatgttcattatcactaaataaacttaaactccaaatttctctcaattcttgtcttaaatcaacattaataattgttttaggtatacctttcttcatattcggtaaccaacttaaaatattagataatgatgctaataaatcaactaatgatctcatattatcaattgataaaaagctatttggattaatatttggaataaattctccaacaattgataatgaatatgttaattcagttgattgaagttgatataattcatcatttttgttattatcattaattaataatgatttaacaatattatttgagatacccttcaatttcgaatcattaatccaattcttaattaactttgaatcacttaattttaataaaatatctttaacttcattaaatttggaatctaatttataaaataatttgaatataatatcaacatatgatggtctataatataatgatgtatctaataaaattaaaactttattgaaaaagattttgaataaattcgatgcctctaataggctattaactttccatttattttcacataatttatcaaattgatataataatgtattttcaagttgtgaaataaaaacaatatccataaattggttgaaaaattcaacagcttcttttccaccagcattatcatttaaattatcatgaattgatgttaaattacatgtaaaatcaataaatggttcaataatatatgccatattgaaaatatttgggattactaaaatatttctcttactttcattgatatcatcagaaccaatgaaaatagattcatcaaatttatattgcaaattaaattcagatcctccattattactagtttcaccaaaaatattatttaatgatttaattaaatcttttgaaattgaattaattgataattgagaaaattcgaaaactgtattattgccagtttgttcaaattgttttgggattttatcaaatggtgaatttttattctttttcttataatttgaatctaaattatctaagttatttaataaattattatcaataatataattaaaaattaataaactaatttgcttttgaacttccctccaaactttatcaattttatatttataaccattcaatttaaaaatttcgtaaattgcaatatgtctctgtaataataataataattttttaaaaatattttcaaaaacttctttaataattaaactattaaccccttgtaataaattaaaattcatgaatggatcatccttcttcttattatcaaatgataaattgatttcaatttgtgttggatatttacttttaacttcactaattgttcttctaattacttgtttaatctctttttcacaattatcaactaatcttgttaaacattcattttctttattaattttttgaatttgtttaaatctttcgtataattcataaaatctaccattttgaacttcaatttcctcattttcatcaattatttcattattaataactttaataaatgcaaataatcccatatttatagattttcttaatgaaagtccggaattaaaatctagactattagtattatcattgttattagtattagtattactagtactagcacgattatcaccgttattagtactattacttattgttgttgataatgatgaagaggtaaaatttttataataaatatatccatttaatttccctaacaaaccatcaaataaaacagagatataactatttaatttaacttgtaaactttgtaatgattcaatattaaataatccattatcactagctaattcatcaatctctttaactaaattaacacttttaacaaattcttgattttcaataaactcctgtaaatcattcaatttctcttgtaattgattagttttatctaatatttctaatgtttgtaaatattcaattctcttattatttaattcattaagtatatttgattttgaattaactaattcattaactgatgataaatttttcctaatattagttaatctatcctgtgattgatttaatgtctcaattgaaattccatatgatccaatactatcattaaataccatatagttttcattaactgatctctgtaaattaacaataaattgtttccttaaatcttggaaattttggaaattaaatgattcaccatcttcaattaacggtaatgcaatatctaatggattacaatcatctttaaccaaatttggccaatctgatccaaacacagtcaacacatcctctaatgattgtattgacgagctcttattgttaggcattggtctatatagatatggtagatctctttgatccgtaaataaaacagatgttgttgttacttagtgaaattgaagatatcggccatttcgagcattaatgttcagatcagttaacatgctttaatcttcttcttcttttctttgatgttgttcttttctctatgcgtctataaacgttatttaatctagaagtaatatatagtgtaaataaataaaaatacaaatataaataaataaataattaagttaatgatacgtacctattttggatcatcaaatggatgtctagtttcagttggatcaattttaaaaatatgatcaggattaagaatacctttcttatcaagtgcaaacttaatacttctcattaaatcaatagtttcagtacctagttctctttctaaaaattctctcttttcactaataccaattccatgttcaccagatactgtaccttctaattcaacagccattaatgacatttcattaataattctatgagcttccttaacttgttcgggttcaaatataactaaaacatgaacattaccatcaccagcatgacctgcagcagttgctaataaatcagctttatctaatttatccatagttttagtgattaattcaggtaattttgacattggaacacaaacatcagttggtaaaaccattgcatttggtttaaattttttagcccaacttaatgaattccataataacgttttacgaactctccaaatatcttctttatcttcttcatctttagcaacttgaaaattaaaggcattattattttcaccaattttttgaactttatttataatactattaagtgaattatcatcaactgcactaattttcattaataataaatgatctggataccatttacgatcaccacctgaacccatttcaacaactgcattcatttgtttattatccataaattcaactgcattacatgaaataccagttttaaataactcagatactgcctttgatgcatcaccaatttctttgaaattcattaatgtaataacttcattctttggtttaatatgtaattttaatgttgcttcaacaataatacctaatgtaccttcagatccaacaaataaattagttaaattataaccatttgaactctttcttggtctttgtcttgttttaataattgtaccatcagctaatacaacttttaatgataaaacattatcctttgcagcaccatatttaacagcatttgtacctgatgcattagtacctaaaataccaccaattaatgcaccaggtgcaggatcaggaccataaattaatccataaggttctaattcttcatttaaatgcccccattcaacaccaggttgaacaacaacatctaaatcatcttcatgaatttctaaaattttattcattttagatacatcaattgaaataccttttctagttggtatataatgaccttcaattgatgtaccaccggaatatggtataattggtattgatgaatcataacaaattttaacaattttagaaacttcctcaattgatgttggataaacaactgcatatggtctttcaccttcccttgcacgtacaaattttgatggatcctctgaatgtgttttaatttcattttcacttgttgttatattatcttcaccgacaattgcaacaattttagataatgcatattgaactctatcatttgatgcataaactaatggtttgagatcttttaatgggatagttgatttagttgattcttccttattggcaagtataaacccaactgcaaacccaactgtaaggaaagtcgttgaaagtgcaaatgttttgaaaatatttgttttgggacttaaagaactatcattgactgttgtttgactgtattttctacagaaagttttcaaagatcttactgatgatcgtgaagtacgtgtaaatgcccacatatcactctaccactacagaaaatacaaatataaagactacttcaagataagattcatactattgatcaaagtgaaaaatcccacatattttttcaccctgtgttgcaactgttgattaatctttccacctaatggacacttatttgctgatatactaacataaaccgttgttagtagtgcaattgacaatagctcatcgtccagtgatcataattgaactgctatatgtcttctattgaggttatttcactataaaatgtgccgtatagatcaaaggcctaactcattcagagacttccattgtcggacatttcctatttaggaagtcccatcaggtcgacatgttataataaaccaatttaactactaaacacacacttctttcttttggttcggattggtttaacatacattcaaccatcaaacaatgcttcctgaaaaccacaatgagttccgtagtgatacatttactacacctactgaatctatgattaaatcaattagtttagcatcaatcggtgattcagtatataatgaagataaagatacaattgcattagagaagagaattgcagaaatgatgggatttgaagaaggtttattctgttgttcaggtactttatctaatcaaattgctttaagatcccatttattgcaacctccacattcaattatttgtgataatagaggtcatgttttcgttcatgaagctggtggtttagcaactttatcacaagcaatggttactgatattattgcaagtaatggactatatttaacattagaagatattatcaatagatatattccagatgatggtgatattcatgcagctccaactagagttgtctcattagagaatacaattcatggtttaattcacccaattgaagaaattaaacgtattagtgaatggtgtcatgataatggattaattttacatttagatggtgcaagaatttgggatgcaagtattgcaactggtattgattttaaagaatatggtaaatattttgattcaatttcagtttgtttatcaaaaggtttaggtgcaccaattggttcagttttagttggttctaaaaaatttatcttaaaggcaaatcatttcaaaaagcaaaatggtggtggtattagacaatgtggtatgttagctagaatggcaatggttgcaattgatgaaaatttctctaaaatgaaatcagctcatattatggcaaaagaagttgcagattatgcagaaaatttaggtttaatatttgaaataccttgtcaaacaaattttattttcttagatcctttaaagaacaaaattgatccaaaaattataactccaatcggtgaaaaatataatattaaaatttcaggtttccgtttatcattctctttccaaacaggtaaggaagcagttgaaaatttaaaacttgcattaaaggaaattaaagaatatagtgaaacaaatccatatgattcaaataaagcagttggtttgtatcactcaggtaacaaaaaacaagtttattagttaatctattatacataaagttgtaaattatatatacacattaatattaataattctagattttcagtatttatcatttaattgtaattagaacctggtcccatagaacccataatgttattgatactgttcgtcggattcattggatctggagaatttggaaggttggacatacccggaatgttacccatattacccatgctacccatacttggcatacttggaatacttggcatacttggaatacttggcatactaggcatactttgcatgctgggcatagtttgcataccaggttgaatattttgtattccttgcattccttgcatattttgcattccgtgcattccttgcatactttgcatactttgcatactttgcatagttggcatgttttgcataccaggttgaatattttgaaccattgtcatatttggtggtatattaccgttttgcataccttgaaaattttgcataccttgcattggcataccttgcatattctgtatattctggatattttgcatattttgcatattagaaatattttgcatgtttggtacgtatggtgaatgtgtacgtgacacatgtgaatggaattgttgtactggcagttgttgcatcggcatgaattgtggcatatttgatatttgtgatatcattggcttttgttgcaaatattgtggttgttgatgttgtggcagaggttgtgagaatgattgtgattgttggtattgatactggtattggattggagctggagattgctgagatgatcctggtattattattgaatttctagagtctttttgtggtgtatcacttcttgaaatattggattgactttttatataactaccatttgatggtgaaacaaatggagaatgtgaagt

SEQ ID NO: 12 - DNA, 1352496 bp, Pichia kluyveri
  >Nicaragua_Y298_000003F_chromosome
ggcagggacgtaatcaacgcaagctgatgacttgcgcttactaggaattcctcgttgaagagcaaaaattacaatgctctatccccagcacgacggagtttcacgagattacccgggcctctcgaccaaggatatacttgctggctccgtcagtgtagcgcgcgtgcggcccagaacgtctaagggcatcacagacctgttgttgcctcaaacttccatgggtttgaaacccatagtccctctaagaagagcccacgagcagatgctcgcagccctatttagcaggttaaggtctcgtccgttatcgcaattaagcagacaaatcactccaaggactaaaaacggccatgcaccaccacccgtaagatcaagagaagtctctagcttgtcaatccttattacgtctggacctggtgagtttccccgtgttgagtcaaattaagccgcaggctccactcctggtggtgcccttccgtcaattcctttaagtttcagccttgcaaccatactccccccagaacccaaagactttgatttctcgtaaggtgccgagtgggcaagaagcgccacccgatccctagtcggcatagtttatggttaagactacgacggtatctgatcatcttcgatcccctaactttcgttcttgattaatgaaaacgtccttggcaaatgctttcgcagtagttagtcttcagttaatccaagaatttcacctctgacaactgaatactgatgcccccgaccgtccctattaatcattacgatggtcctagaaaccaacaaaatagaaccataacgtcctattctattattccatgctaatatatccgagcaaaggcctgctttgaacactctaatttcctcaaagtaatcgtcctggttcactccgaagagttagccagaaggaaaagacccggccgcaacagtacttaccataggtagaccgcccgcccaggcccaaagttcaactacgagctttttaactgcaacaactttaatatacgctattggagctggaattaccgcggctgctggcaccagacttgccctccaattgttcctcgttaaggtatttacattgtactcattccaattacaagaccaatggccctgtatcgttatatattgtcactacctccctgtgtcaggattgggtaatttgcgcgcctgctgccttccttggatgtggtagccgtttctcaggctccctctccggaatcgaacccttattccccgttacccgtgaaaaccatggtaggcctctatcctaccatcgaaagttgatagggcagaaatttgaatgaaccagctccagcacaaaggccatgagcttcgaaaagttattatgaatcatcaaaaggcccgagggcattgattttttatctaataaatacacccctcccgaagtcggggctttacgcatgtattagctctagattttccacggttatccatgtagaacggaactatcaaataaacgataactgatttaatgagccattcgcagtttcaccgtataatgcttatacttagacatgcatggcttaatctttgagacaagcatatgactactggcaggatcaaccagataactacgctcagatgagttttgttaaaggaagattttaaaaacctacacatagcactgtttgactttcttcaacggaggtcccctgtacaaagtacagcttcgtccgcttcagtggagagtggtcccagatgtcacgtttgcacggctacatctccaaccccgtccccaataaacctagtggtccgctggctatcagctagcaacccaccggccccgtcagtgcgcaccacggtcgcaagaccacaatgcccctgtccaagacttgcgtctcttgtccccggccatacccaggcttgtccgtagacgcccctgcatactctccgtgggatcttggcctatcggtgcaaaacaccgctaagaaccgcattttttaagtgcttttctcatgtatatcccccggactgcgtaatcttgccaaaaattcgcagcgcgcgttgcgcgtggggcccaggagttaaattggacttcgtttcggcgtgcaatgttttcgagcgcgaggtgaagtttttctttttgtcaatgctgctgagccgtcagccgtgcatgcatttctaacaaatcccaatttgcaaacttgcccaaatgatagtcaagaagactcaaaaagacccagattttactcttacaacatattcactttaaaagtcaagatagttgatattaatacagtaaaatatattaaggctaaataatggaaagggtcagctttagtccttaaaaagattctgtaacatatttttgtatattatttgaagatgggtacatagcttttagttttttaaaagattcgaatgaaaatataatgaatgtaccctattaaagttcgaacaggtaaaacctcacaattctacagctgtgaaataagaaaatttgaaaaatgtgcggattcaaaaaaaaataaaacattttgaaaaaagtttggttttttcgcttaaatgtttaaaatctttatccgaggatcataaaatctcggctagtactttttttttagtaatttatactataagtggactacaaaaagatgttttctgtattagcttcaattgcgaaactttagttaagagataatctctggttataataaaattgtagtattattattgacaaataacacaacaagagttgtacctaattttaatttaaaaaataaaaagatttgttataaacctaatccaattgtagttgaaaacacaatattgtgttgaagatcttaactttgtggtcttacatgttataaacttttttacttcagttacagaaattgaaacgtgtttaactaactaattacagtctatctattctaaaatttattctaattttaaagcttatattgctcagttatttgtgaaacaaaagacatgaaaaattatgcctaaacaaacttaaatgggatatactcaaaatttagtagtacttaaaaagaaatactttttcctaagttaaatagttacaattctcatcaaaatttttgtcacacattacagtttcctgatccaaaaaatttattatcgacatttttttttatctataatgaacaattccatttcacatttctaatattgaatataacaattatttcaatggctatacttttaatggttcagttcatttcgacaataccaatttatgtaaaatacattgtgtttatgttaattattttaatttatttagttatactgtatatactgacatcaaatgaagatgttaacaactcaaaatgagtttgaaaatagtattttgtgtcttaaacatacccgaatttcgaggtaattgtgaaatcgtttaatcgcttatccgaaaaattcaaacttttctcaaaatgttttttttccagcgaaataagagtaagaagcaataattaattttaaattatgcagccactatttttaaaacttgtatacattatgtctgcttcaacaaatacacaataactggctatgcctatcaatagcttaatagatggtaatgagatgtttataattacttatatcattacataacaacacataatagataattaattaatttaactttccagtattattcaagtaaagttcaatataaaggtttgaaatacgtttattataatatgttttattctgattgaaataattatgttcaataaatatacaaacacataaataaaataaaatcaatttaccattatcctttaacaatataactttcattattctttttttcatactataaatgagttaagttaaaaaacattgaaaataatggattattgctcattgaaattaattcatttggtaatcgattgtttttatatttatttaaccataattcatatatcaaacatctagaaaattcacacgaaccttggatcacaaattttatgtaattttgaacatttaatacaaactaaatttgaattcaaattaattaaatttttaattacaccatcattttgaaacaaaatatcaattgaattaaggaaatatgatttcttaataccaaattaagaattacttgtatacctattttcatatacgttgagaaatttatcccaaaaacttgaattaatataattaatatctttttcaattgaattaacaaatacaagtatttcaaaaagtttcgaatatttagaaatgatttacatttaaacatttaataacatcaatatcattaaaatatttaatcatataaatataacagattgaataataaagttttgaattatcacaatggtgttttcaattctttaacataaaccaacatttaccacattgcttgttgtaatatctatatttcattaaaacataatttgaaaaatggatcttcatttaaaagtttcataattaaatcattatatttatcatttaattttgaacaatttttaaataacaaattaaaatatctttttattaaaattacttcttaattcaactgatttattactttaatccaaaattcaaaggcaaaacatcttgaagaattactcttcaaaccttacaattatcacatatgattaaaagttttttcaaaccagaattcccacaagttgaacaaagaacattatcaactacacattatctaatgcaaatataattgatggatcatctctaataaataaattaccataaactctacatttttctactattgacattcttcagtatttaataatttaaaaatttaaatcttaaatttaaatataattcaaaattaatttgaatcttgattagaatttcatcaatattattagttaaacacttaaaattcaaatctttatgatactatatgaataaatacttatataaattaaaattaaattgttataatgacaatgatgttgattatttcaatttattaaacatttattattgccattaaaattatttttgaatcctatagtaatttccattaaatataaatgaaataaacaatcttcttcattaaaaaatttgataatcttattcataccatctttatctttatcataattaatatcagttttaaattcatttaaccttcttttaccattattgcaaaatccgttacatttattcaatatatttttaaaaaacaatgaattatttttaaaattataatcattatcatttaaatgttcagtttatcaaaatcattattatcagttttgattttttctaaaagttcaaatttcgatcttggtttattatatttaaatataccaccacaattataacaaatttcattactgaaaactaaatcaagacaaaatataatacagaaattaaatgaaatgaaaactttaccaattgtattatagttattatgaaaatatttatttgtattagattcaaaatgttcattatatttatcaataactttaattttaaaaccttgatcaaaattaattctacgttctgattctaaaaataataataattgaaatcttaaattaaaatattcatgaatattattattcaaaaattgattaatttcatcaaaattcattgttgattgaaatgaaaaatcaattattttatcaaatattctttcatcaataaaacatgaaaaatgaatacaaataaatattaaaattatactattcgtacaacatttatgattattagtatgatctcaaattgaacattttttacgaatctttttgtctctaccaaatgaaaattttctctcaatttcataaataaaaatctcaaataatacatcttcttctttgaaataattaattaaatgattaaatttattataatattctttatcaaaattggaaaataatttatcaagcacatctttaccataaacaggtacagtagaatctctaattttaaatcgttttctatgatcaattctattccttaaatttgataaatttatcttatatttcttcaaatcaaatgaattaaggttcatattcttataatagtcatctaactttttaagttagctgtaatatcattaatatattcatcatagtcattataatcatcagtatcatcattaataataattgaatcatcatttaaattatcatttaacctactagattttctttcttgaatcattgaacctgcagatgatggtacagaactaattgcagttttctttgatgtattattagaaactgtaatattattaaaagattcttcttaattctaatttatcaaaatattctttatgagttttcttacaagtaataaaatattgtcattattaatgataccaggttgagtatttaaataaattagtaaaataataactttaattgactaactatatgtagatgaaatgttttcttagaataattgtattaagcataacactgaagttttcattagaatcaacactataattaatatcaaatgataccaattcaagcggtgatgttcttagtgattatgatgatttaagtcaatgattaactacaaagaaacaacatgcatttcaaatgttgtttataaagaaaactgtgcgcttgaagcggtttaagtagttttgaaaaccaatttatagagatcttcacttttttcttattcagttctttttggcacaggtattgtttagttatagatgtgggtatattaaatacactagttaatatacacataaataacatataacatcaggcatatgatcttccattcaatcaaattgcctagtcgttgattacagttattcatttatatacctgattaggaaatggttgctccattaggaaatcatcacagattaggaaattgatataaaaattaacataatactcaaaggaggtgttgattaattaactttctcttattaaaagatggataattatgtccactggaacaaatctcctaattaagaatctgtttttacgaaagtggtgtggaaataatgtttaaaattgaattcaaataaatttagcaaatttctagcttaaatacaggtactccccccactttaaaaaaaatgaattatattagaaaaagattataaattactagtatactataatatttcaataacttctattttttcaactaaattatttaattggaagatattctattacatttaattcaccagatattatatcttcatcattatttaaactttcataaccattaaaatattctctataaaagttcaaaaagacttcagatttacataaattccttgattttgaatcatctgtatagaataaaatacatctaacaaaatgaaaaattgattcacatatttcacttttctttttaaacgtaatttcttttccatttccatcaaaacaatatttgaaaataaatgataataattctttatcacataaaacaaaaaatgttaaaacttgacaacctaatgcaaatttataaacatctgaatcataagaaacttctgaataaaattcaattaattttaaaattttatcatcaaaagcttcaatattgatcatacaatcaataaattttttgatatacttagtattaatatgatcattaattggtggaaataaaattttatgaattattctctcatcaatttgataattaggaaaaattttaataaaattaaatctttcatctttatatgattgattaataaattcaatcaattcatctatatcttcagattcagatttcacaaagtgttttttataaacatacatatagatattataaggaactttcgttttattttgaatttttgaacttttaaaaacattggttaaatttgatttatttaataaattttcaagttctttaattaatttgaattaggttaaaagttcgtttgggtcagacatgttattcatcatcaattgaaaatattaaaacatgtttgatgaaaatatttaattttgacattatttgaatcatttcattcaatttaacgatacaaccattatcaattaaacaactattaatacaaattgaaaacatgattctaattttatttttcaatactctttcattaacattaatttcattatcaactctttggtaaaactcaatagctttataatctttaattttttttaaaatatcatcatttaaatcaaaataattttcaaattgtttcaaatttaaaataatataataaaaacaataacatgtataataaaaatttccaaaatcaattgaaacatcagttttaaaatagtcaagaatcttaacttttttattaaacttatttgaaatattcacattgattgaataattatactttttttgaatttttttaaagtttttatccaaataagttttcattattgaaaattctctataaaaagtttttctaatctggaaattaatcttattaaactttttattgaattcaataatattgaaaattctatttaaagaagtatcaatatatatcatattaataatttcaatcttttcatttaactttttaacttttttaagttttcttttatcaataatttcttcaattttatcattaatttcttcaacttctttatcatcgttataattatcatcattttcaacaatctctttcctcaatagtcattagttgtagaataaaacattgtttgatctcttaaatagaaaactttaataattctaccatcaccattctttgaaattttttttctttcaaatagttcaaaataaaaaggaattttatcgtaatcaataatgtcaagtatattataataatttcttattaaattcaatcaatcccttaaaatctttaacgaaacaattaacaagaacattagaaggtgaaactgtctttctttcaactttatcaagctatatattgttgaaaattgaatctgttgaattaattaattgtataataattaaaccagttttagtggatacatatatgaataaattttgttattattctcatctgctaatttacaacaattatacttgattaaatattgaaatttgattttgaaacattcaaataattcaccataatctgattcaattataatctcattccttaataatgaaagtaatatttggtagttttttaataacaaagagagttttaatttgattcaactcctaatagactgataaacctttatgaatataataagctaaagttataataaaagaattacaaaggttgatcatactattcatagtcatagctatttaaaaatcatgttttttattcgattgctacgtaccaaccaaaaaaatgaagtaatggtgattctagtaaaaactagattaagttattgatatgttaatctatgacaaagaccaaataatacttgctctataaagaactatatacgataatttacttaacgataatgcatttatttgaaaataaacaacgttgtccattatttcctgatattacgtaagtgatctcttaataactatattttaatccaatcacagtgaacaattataaatgatgttgtttacttgaagaacttataaagtgttttacagtattttagaactattgttattcaaaattagaccatattagttttatcaaaatcgaatttcaaattcattaacattttaatttagcatgtcattattttccattatcatcaccatgcattagttcatcaactatttcaatttcaattactttgaatttataagtagttgtaatatcttcactcttaaacttatctaattcttttttgggtaattcaggtttttatgacacccctatttatttgacaaatttcataacatcagctatatcaccatcaaatttgatttgaccagtttcaaaggtgtcaatttaatgatgcttagcaaataatacaataaagtattctccatttaacatattatcataatttatatttgataaactagccagtgcatcgtatgtgttgatcatttcatttctttatcataatcggcgtatttagtaccttactgaatggttttttttttgcaattattcaaattaacatcaaatgatattcagtcatatttaagagtaaaatgccaaattgaaaactttctataataactaataattaaacctgttggaataagcataaaatatattaattcattttccgtaaattactctcaactaatttaaatagcttattcttaaattttatatcatgctaaagcacggatatgttatgagggttctttgacttcttaataaaagtaggcatatctttgttttaattattattatctagcattaatagtattatttcaatcatatcattattatgtataatggagccaacattttgatactcaatctaattactattttcatttttataatagattaaagttcctgatattccatttcttggtaatttcattattggggaattcttaattagtatcggttgttgatactaattctatacattcaagtataacaataattgatacattcatcaacgtatatttattcaaaatgtaattcatattcaattcatcaatctatatttgagctgcaatacctatgaaggacatattttaaaagttcaaagaatctaattagtgaagataaagaaaactttcagaagaaaagttaactttgtttgttaataatcatgatgtacgtcaacttgtaaccattcaaatacccgagaaataaccatcattaatatcagtaaaatcccaaatacccaaaaaaagggtacttttctcaaaaaaaaattttttcaacgaattaaagaatatccttagataagctatgacatgagatttgttgcttgataatagtagtttcacattttgttagctttttgaccacttttaagtagtttaacattgaatatagttaatattagctattagaaacactcaaagatgtattatagtcacttttttaaagtaaaaaccctttatttctggtgattgaaaacatgagaaatacctggtttcaaatcattttaatatatctgtgtacttcaattaccaaattttattttattaatttgcaagataaacctatattgaaattaccatcagtgaaaagagaaataaaaagtaaatttataccgtgtaaatgtaatagatggtaatagctttatccttaaagataagaggaaaacatgtaatttcggtataattaaattggatgagccgccgcgtagaaatttagtagtgagccttcaaattttgttatcgatagtaaatagtagataaaataaagagtttaatacatgaccattgggcagtctgattgttgaattgataaagaaatgaatagaagataaaacaaagaagaaaagaaagagaaaaagatggaaagaaagaaagaaaaggttcatcaatttaaatgctcatcattctaatcaatttgaaggctcatcatagagcttttgctgatttgacatcatcctttaactttagtaatgatatgaaaagatataacatttttacgcaataaactaattgactctaccatctttatttttgtctttattatcagtattatcaacaggattataatcatctttactttctaaatgtgccttatcaagatttttagatatctcactgattaaacagtctgatgctgaacatttaaatgcaacagcattatatactttaccaatcttaatttgataatcagtttcatcggtaaaagatggtaaagaaccaatttagatgattgtttattagacttttcaacatctttaaataattcctctaaacttctaaacatttcataagtttctttataagatgtctaaacatataaaaaacctctttattgttaaagttgataactccatagtttataaaatatgatttctttttgataaaatgcgtttactgatttatctggaaaagtatcatacaattcatcatcaatcgtcgaattactagtaattgtaaaggtattgtttagtgttattcattatttgtttggtatgataaagtaaatccccaataaaacttataataaaaggaagacaatcttatcgtaggcgtatcataacgtaaagatattattattaacaataaaaataacttaaagcctatatacccttatacattactataaaaaatatccaaaaacaatctttatcatattctaaacttccaaaaatagtatttattaatcaaaaaataataatctattcttatcacattgcaaaccaacaattacatataaggaatataacttcattgaatatttataatcaactgatttatagccacgtctaccaatccaaaaattatacaatatataggtaaatctgaaaaaacattgtttatcacaaaaccttctcaaacagtttgaacataacacatcattaaatggatgatttaactttttaacaatttcatgcataccagttggaaattccaaatcaatatcaaaatctctataaaatttatcccatctattcatatatctaatatctttagaatttattaatttttgagctagttggagtgataatctattgaaattatccaatgatttatcatcatatttttccataaaaatatcataaaatttatcagctaaaacttcaacatcatcaccataatttaaaactaattcatcataacaatataagaaaaaaggatcttgaataattctatgaagcttttcattagatttattaacatcattcaattgaatatttaatgagtttacattcattctatcccctagtactcttaatgaaatatcaatacttgattttttaaataaagtatcatatattctcttaaatggttgatttgtaactttagaacaacaacaatcatgaccagatgtttgatcattcgtgacataaaatttttcaaatcttttcctagcacaaaaattatctgtagttacaactagaccttgattcctaattctaccaatagattgaattatatcatgatcacggaaagcacaatcatataatatcactaatgaaatattttgtaaatttataccatacgacatattcttggtggttaataaaattttctcattgttataaaatgattcaagtaccaaagttttctcttcattatctaaatcaccatgaagtttatgatacggtaaattcaattttttcaactcttctttagatttgaaaaaaacaatacatctagaagctaatgatttttcaaaattaaacaaaacttctaataagttcaaattctttttagaaaccaagtaaaaatttttgattggcaattccgtaacaaatgaattataattcattcttgatttaatatttaataattgaaatatttcgtaacattcttcccttttgatggtagcagaacataataatattttatcaaattcattaaagttatattgatgaaattcatttataattttcctgcatgaactttctttagcaattaaatgacaattatcaaataaaattattcctttcaaatttttttcaattgcattcatattaatcttattgaagtcttcatatgtacctaaatagcattttttcaaacaactttcattaatatcatcaactattttttcaaaagagccaaaatagccaggatatttctcatgcttatcaaactttgatatactgtaaggtaccactaacatattcaatttattgacattcaaatcaaacattatcttggaaataaaacttttaccaaacccagttctagcttgtaaaatatagttatgattagatccattaatatcatataaacatgaacgttgttgatctattaattttatgttcaattttttcaaatgtttctcaatctgtagaggtgtaaattttattggatttttattgaaataatattctatatcaccattcgtatctgcagttctatcattactttcagtcttattcaataaatgatcccatttaatcatcattttatgattctcagataaaagaacatctttaaggaagtaatcaagatatgcggtaaaaaattgcctaaacaacttaaagttatattcatcactaaaaattccagtgaataaagttctaatagctgcaatatcaattttagttataactttctctttaatcgctatgaacaattgattatcaataaaaatcaagctatcatgatatgaattctcagttttcaaacatttattatcaaaatccttcatttgaaattcatcattttcattaaacttcaaaagtagcgatttaaaatcaatagtatcgtttttcattgatagttttgaaaaaaaactagataatggtaatcttatagtaaaaaaataatgtaaaaaaatcttagtaacttcaccattgataaatgaaatcatttcattagttgatctttttttaataaagagatgaaatttattagttgatgaatctttatgtataaataaattattgttattttcaccaacctttaaatcaaccaattcaaacattcttaacactccaccagatgataaatacattaacaaaataacaatatttgtacatctattgaataaaccaaaaactttatttaaattttttctaatatcttcattattaattgaataattttctattgattccttaaaattttcaataaaactgccgttatttctatcattgaacccttgaatcaaagctttaaaagtttcatttattggagataatttgatctttaattttagaaattggctaacagtttcatgatacatagcaactaattttctataaccctttgatataatagtagagttcaataatataccaccaatatagtaatcttcaccttttataataggtattatacgagttttattatcttcattggctaattctttataaattatattgaaattattatagacattgttaacttttttaataactatatcataatataattcattaaattgatactcatttgaatatgataaaatatacttgatgaatcgattaattgaatgaattattttaacagcagatggtatgttttcaatattttttttatcattaattaaacataaatttaaacaaattgaaaataattcttgatcgtttaataataaagttaaaatttcttgaaacataaaaactttcttaatgagccgttgtttatcctttttgtattcaaatgatgtatactcttcgattcgattaagtatttcatcatcaattttgaaaaaaggtttaaatgaatgtaagttcatgatataagtataaaagtcggatgaaatttgagtatactctctaatagttaaagggaataacttagcaatacgttcatcaatattagtgtccataattgtgaccgagttacaatactgatactcgttatagttatttgtgactaggaaattgatttccaacacttcagatgaatatttatacgagattggtaattgaatctttttataagtttcaacaaattgaattatattgaaaactttattcaaagttgtttttctataaacatcataattgacattatcatttgaattatcatcactttctatcaaagttgaagtattatccattgaatcggatcccattatgtaaagtgctgtgagaatatattcttttaatgatagaaagaagtaccaagggcaaaaatgattacaatcaatatcatgtctttaaatagaggaaattgaatgagccttcagatacgaaatgagccttcaaaatggatctaatttactaatttaaactaaattagtgtgataagtagattaatttggattaaattgaattattaacatgattatcgttcttaaatattcttaagtgttcttaataatcgttataatcactataattgatttaaaatacgtcatactcgtatttatacttagccttgtatatagacataaccagagcttagatggtaaaattaggtgttataaacaaaataaacaaacattttaataagaaaataaagcttaggtaatcaaatttgagaattatataaaaaataaatagtctcgaattccaaagtttttggctgcaattttcttcaatatactctttctttaattaacttaccaacaccagagttaattcctaagcacaaagataattttatccatcttatgaatttcattgaaatttccatgcatataactaaaggaaccctatggaaagaatttgtaggttcccatttttcaaaaagatgaagaatcatgtgagtgggtaatgaaaaacattcttttaaaaatgaatgcttttcagataaatcttcaatataattcataaggtggataaaattatctttgtgcttaggaatatcatcactaggaacttctctgctgaaaaaaagaagaaggtaaaaattaagttcaaccattaatcttggaataaaattcatatcagaattattatcagaatcagtattaaaggcatcttgaaagataaatggaaataaaaacataaagacaattgtatctactgcctttaaacgtttatttggtgagtttgcagtaaaaaaatgtgtccaaatttgaaggttctttgattaaagtttcaccttttcaacaatatccaagtattctttgaataattctttattaattttttcaagataactaccaaaaaacaatactgccaatatccttttagggaaaacaccttcaagtgcaacatgcatcaaatctggacaaattatcttcatgaaatcaaattccctatccaaagaaaatgcaaaatcagctttaattgaccattctgtactatttttcttgaagtttttatcatctaccatttttaatctatcttcagaagtgattattctaaacgattcgagatctttaaatgataataatccttgtttgattttttgtttcaaatgcaccaggtttattcgttttaactctttaattattattcttcctctttttcttctttttagtgctagtagaagcactattcacattattgatattattattgattttattcatattgtttacattattgatattattattaatattcattggatttatattcatattcatattgatattaactggattcatactcatattcatatattattattatttggattattatctgtattattattaattggattattagtattgttgttatcatcacaaaaaatctctttcacatagtcacttgaatctatacgcaactgttggaaaccattttcgtcctcaactatttcaactttagaactctcttctacttcttcgttatcatgaatttgacagtctgatctcttttctcttcgaatattacacaaataacatggatgatttgcagaagcacctgtggtatctaataatgaacatacagccggaatatctgcggtgtaacacaccgggttaatgaatattgtatactcaacaccgtttcttttgattttgaaaccttcatctctcaaaagtttcaaatctacaattaaatgtttcatcatttctctaataactccaggggactttgtaatatacttgaaaaacagtggaataaaatttaaaaatggattgttttcttatctctgctggtaagtcaaaaaattttcaactatgaaacatatagattaaacatttttttatcatgaacattacatccatccatcgacaatctcaaattaaaaacaaaggagtttgaaacatctttgttgatctctttatgccttttgaaatttgcaccttttccaattctatcccaaaattctggatgatcttcatttaattttctttccttttcaattctttcgattagtttttcattcaaaaaaattaatgccaaaatggaacgaatactttcatatctcccagtagtgattgttcctgtacataagtttttaaatttttcttaactgtttattttatgcgatcaagtaaattcataatataccagatgactataaataagaggacatatcccttgttatatttttatattacattatataagttagttcatttaccaagtaaaactatattaatgtatgtattgtgtataagatgctaaacgaatatatttacagttaagttttcttatattgaatatatgttgaatcatcttctaaaaacatttctcaaagatcaggcattctataatttgtttagtgcttaaaaaaaagtactggttaagttattaacaattatatctcttgattgatgaaatttgtatcacaagcttaataagtttaatccaacttgtttcaataggaactataataggttaatcatcttaattgtctcatatagatgttttgctaaactttgataaattatgttatcaaaaatatactacttcattcattaaatcaatatgctttttattaaattacaatttgaattttccttattaccggcaaggacatcttatactcatttatcagtctcataatattgtgctccgacgtgttgctaattatttaatccatatatcagatttttttgatcatagaactgatgacctagttaagatatgttcatttctaaaatttaataagagaacctcgtttgatactctattccagaactactttcattattagaatcaaatttgtagtactcagtttaaatattataataaatagagcttttattactccatttcatcactaacaaagaaatattctttcatttttctaattatatcaaagtgaatcttcgaatatttattttcagcataatcaactcattgttaatacaagcaattttcttaattattaatacttatccaggtccttcataacaacaataagtacatcttcagcaacataatagaaaaaataaacaccttcaaaggatgattattggataatttgttatttaatttgttaaaagaacgaaaaaaatgcatagaacggttaccaatagatttttcaaaaacaaaaaaccatttaaactttacaattaacccttattggtaaccgttctatgcatttttcccgttcatttaaccaactaaataacaaattatgtaataataatcaaactagttcactccagtaaatgttcaacccgaaattgatcatataaatgtagaaagggaagaaggtaatcttgttgttattcagataattcagagtcagaagacttaatgctagatggaggtttaatatgctttttctttcttgaaatatgtttagatttaatatgggaacttttttaagatgataatttccttttttgttttgattggaggtttttcattttctgctttgaagcaataatttagctttcgtagaagacatagttggctagtataatttaatttaatttggaatacaaacactagccggtgctaccaaataaaattgagtttatctgatatagttgataacttgatgatagtaacaagtatcaaataaattcacttgttggatcttttatttgtgaattggtaggcaagataaaactagatagttggtattagttagttcaatactctgattgatgtcaatacgagataccatatcattttacatacccgagaaataaccatcataaaataaataaaaataccaaatacccgaaaaaagggtacttttctcaaaaaattattttttcaatggattaaagaatgtccttagataagctatgacatggtatttgttgcttattattagtagtttcacattttgttagctttttgaccacttttaagtattttaacattgaatatagttgatattagttgatggaaccacttaaagatgtattctagtcacttatttatagtaaaaagtgtttatttccggtgattaaaaacataaaaaatacctagtttcaaatcattttaatatatctgtgtactttaattaccaaatttcattttcttaatttttaacataaacctatattaaaaataccgtaaatgaatagagaatcaaaaagtaaatttataccgtgtaaatgtaataaatggtaatagctttatccttaaagataagtctaaaacatgtaatttcggtataattcaatttgatgagccgccgcgtagaaatttagtaggagccttcaaattttgttagatagtagatagtagatataataaagagtttgatacataagtagtgagcaatctgattgttaaatggatagagatatgaatagagaatgaaacaaagtagaaaagaaagaaagaaagaaagaaagaaaagaatgagccgttacttttagtttttaaattttaataatctttaaataggggaatctaaaaaattgattataaagcattatagattaaagataaaaaacgattgaaacaataaaagggtggttaaatagcactattttgaaagtgcatcataatcacctaaacaaccacctggtgtaagttcaagagcataagtttctgctaagtaatataagatattatcagtattaataactgcaaatgatgagttattttcagcatattcaactaattcatccttttcttcaacatattctgcaataaaacctttattaatactatcaatatgtaagaatctatgaaataaatcaatacctgcaaatttttttggaccaacatcagtaatattaccaattacacacatatcttcaattggtttctttgaagtgaaaaataaatcacaaataacagtttcctgtgatgcattaactctatgataaccaggccaagttgtaggatgtgaagcacatgaaccttcaatatcatcacatctataaagtgcaccatccttcttaccttcaacaatattatcaataacacctaaaacagttaatgggttaccattatcaccaaaccaatgttcaaatgcttcatcaacaccttcattaattaaatgagatcttgcaatacttgcaacttctaataaatcttcataatatttattaattaatttaatttgagttgcattacaattttcaattgttggataagtaacatcagtccaagttttcataaaatcatcagaaaatccaacaatttcttgtgaattagttgaattagatgttgaattagataatttaactggtaatgctaaagttgttgataaaagtgatgcaataattgaaattgagaacttcatttgatttgttgtttgttgcaaaatgatgagttctgagacatgtcattaaatacatggatattaccccagtttaaatagtaaacggttgagttcaatttaattaaactttatttagttaattggattattattttgcaattatttaattaagtcaaaccatcaaggtacatttgaacttatcggagttctttaaaacaacaaattctagttattaaatgtaacattcttcatatatgactgttgtaatttaatcatactttgagtactccaatgctaattccaatataataaagggttcggtaccttaatatattgtccaagggtttaaagaaaaccctttttcacgcaatgttaaaatctccaaaatttgaaaaaattgggtgcttcttgaggttgctttaaaaagagtttttacaattaataacttttcttctttcttttgattctttgtattttatcttttgacagggttcaacaactattcatgaggacatatgtagttgtttgattcttctgcccctttttttctatatggaatagaattagtttattactatttatgttaaaattttatgtgatgaatgaaatacattgaacgcttgactactgaaattattggatgagaaagtgttatatctgaaatatttttaacataataagctaattcttcttttcatatactgtaatttgttgctgtaaacatattatatataaataactataaaatttacataaaattacgaggaattgtatcttcaaatacttgatcaacaactaattcaccattttcatatgctttacgagtattagttaaatagaaattttctgcatctgcctttaatgttgaaacagtatcaagtttaattttccaattatcactctctctacccatttcataagtccattcacatgtatttattgctgataatggatttaaaggttcaattttccaagtatttttattaatatcaccaaaataaaaacctgaaattttatcattattatttatttctgtacaaccaccattttgaatatctgttaaagtccaaatatctttaccataatcatattcaatatttttaatacgatcataaggtctaattttccttaattcaatatcttgtttcataattgttggtttaccgaaaattggtggattaattttattattatcattaacaattggtaataataaattacctgaatgtaaagttaaaattggaatttcaggtgttggccaagcttgaggccaatcacatgtagataatgcaatacgtaatttatgacctttttcaagtttaataccaattgcatctaaatcaaccctaattttatatttttcatttggtttaagatatgatgggaattcatgagattctctatgagttaaatttaattgaccccaagaaattaaaacatgttcaccatcatttggatataaatcaactaatctaactgaaatatttgctaattttttatctgatgaaattgttaaatcaataaatggtaaaccatataaatcaatatcattttcaaaaatatctgaatcaaagcataaacatttagaatcttcatttttttgatcaccggggaaatcacctttaaaaccaaatggacaataagtacctctaaacataccatgagataaagtaccactaaatttaacatcataatcatcatcaattgtatctgtatctttagattcaagttttaaattattaccatttaattttaattctaaatattttttttcaattggtttattagttgaaatccatctaccttctctagaaatataagaatcttgaattgatgaaggatcttgaacgaaaactgaaagtcttggtaaatttaaattattttctctttcagggtataaccatttagtaaaccatttagttgataattgttgataatcaattttaggtgaaggttctgccatttcagggaattcatgaacccaaggaccaacaatacaggcagaattttcatttggtaaattatcagccattctgaaaacaggatttgtataaccatcacgaaatccaccaattgctaaaattggtatatctaattttgaccaatcttcattaattgaaccatgtttccaataatcatcccttgtttgatgtttaatccaattagttaacattggaggtacatttaatctatctaaccaattttttttccaactatcaccaacaacttttggatcttgaggtcttggttgataaactaacattgttgacccccaccaaagcatatcacttgctaataaacaaccaccacgataatgaacatcatcagaatatctatcatcagttgacattaaagttataatagttttcaaagcaggatgttgtcttgcagctaattgtaaaccattaaaacctgcccaagatttaccaaacattgcaatattaccatttgaccaatcttgatcaacaatccaatcgaaaacttttaaagcatcatcttgttcaattttcaaatattcatcaatcaatacatcacttgaattacaagaacctctcatatcgactctaattgaaacaaatccatttgcagcatagaaaggatgtctaattgaatctctaataattgtaacatcagttctataaggtatatattcaattaaagttgcaaaagatttagatttatcattaaatgcaccagttggtatccaagctcttgcatgaatataattaccattatcatctaatttaattctaatattatgaacagtttcaacaccgaatggtaaaccttcagcagttataacttcagttaaagcctttgggttattatttctaacattaaaggccattttgttagtgctttgaggagaaaaagatgagtagcgttaaaaatgtaattaagcaatatataggaatacacgaactttaataatagaatacactccgaatgataaacagcaaatgacaaatcagataagaccttatcaaactgataaagagtgaaaaaactgtcaccaaagacaaaccgtcggaataaacgctttcaaccgccgttcgcaactggcgaaattacccactggaacacattggggaaagtcctagcgaggggggagcacccctgataagactgattcacagcaacaatagataatagaactcgaggtggttactgttacttcctctatctattgtcctctagtattactatggtacactgtatgtcgacaagaccgagctgggccgcgatacagttatcaatgacttatcgtcatgtctacaagacttatgatatcattattattaagaaataatgatcatttcagatcaaattgctaatcttatcagttatttctttgatatttttcaccacaatctgtcattctcttttcttttttctatttctatttctatctctgtttcttataaataccaccgttatcctttaacttttaacctttaatcttttgatctattttaactttcttctatcaaactatcttatcattactctcatttaacaaaaaaaaaacatgtctttagtagaaaaacaagattataaaataaatgaaacacatggttcaggatctgatgatggatctattgttgaatttatggaaaaaggtgttcctggtgaacttaatgaagatttaacaattgttgaatccggtgatttagtattacaaaagaaaatccatctaattaatgatgcaattgatgaaattggttttacttggtttaatttacaacttttctgtattgcaggtttcggttattccgtcgattctcaaatggaaatgattcaatcttctgttaaaaaatatgttgatttacaaatgaaaggtggtggatatccaattgcaactgaaattttctatgctggtttaattgttggttcaattttattcggttttggtgctgatatgattggtagaaaattagcatttaattcatcccttcttttaactgcaacttttggtttctttactggtggtagttcaagttatgcaatgtattgtatttttatgtttttatcaactcttgcagctggtggtaatattgcaactgatgttgcagttttcatggaatttttaccttcaaaatatcaatatatgaatactgcaatggctgcttggtggggggttggtcaaacaattgcttcattaatttcttgggcctttattccaaataattcttgttcaacacctttttgtccatcttcagagaatagaggttggagatatgtttggtatgttaattcaggtattgtgatgggtgctgctcttttacgtttattcgttttaaaattagatgaaactccaaaattcttagtttctacaggtagagatgaagaagcatatgaatcaattatgaaaattgctaataaatataatagaaaatgttcattaacattggaacaattaaaagcatgtggtgaaattgaacatacttattttgattcaagtaaagcaactaatgttacatctgcaattaaagaattatgggcaacaactaaagttaatttagcaattttattctcaaataaaacagttattagatcaacagttttaattttaacttcatggatgtttattggtatttcatattcagttttctataatttcctttacatttatattgcaactcatggtggtgatactggtgatagtaattatattgtttatagaaatgcaactttagataattttacaggtattttcggtccaattttaggtggtttattaattatgattccaaaagttggtagaagaggtacaatggttttcggtgcattatcaggtatggcaattttatttggttatacaactgttagaactccaagtggtgatgcaggtttcggttctgcaacttattttttcattaatgtttattattcatgtctttatgcttatactccagaagttttcccaacaaaagcaagagcaacaggtgttgcaatttgtttagttgcaggtagaatttcaggtgcatttgcaccagttgtttattggtttggtgaacaaagcggttcaagtgttccaatttgggtttgtggtggtattattggttcattatcaattcttgcaatattaatgccttttgaaccaagtaaacaaagatctgtttaatatttgtcttttttttacaatcttttagttcttttaaaaatctctgtttctttacattatatataaaaccatcatactttattaatatatccgtttaattataaaatcattctatcaataacatgacacgaaacatgttacgtgtcgtatagagttgcacgtggattgtcatttttcacatgcaatttgaaatttacgttatttttttttggaggctcaacacttactaaagaggtatttaaatcaagaagatttcctcttatttttgccagttgttttctcttgaattgaatactttaagacaagatataatgtctgatagtataaacgtggtgtcaaaagataataataatcaatttattatggaaaagagtgattcattagatgaaatcacctctgaaagatataatattgataattcatcctctgatttcgattcagaggagaaaggtgaatcaagtctcggtgatgatttaacaattgttgaatccggtgatcttgttttacaaagaaaaattcatctcattaataatgcaattgatgaaattggttttacttggtttaatttaaagcttttctgtattgcaggtttcggttattcagttgattctcaaatggcaatggttcaatcagctgttaaaacttatgtcgatttacaaatgaaaggtggtggatatccaattgcaactgaaatttattttggcggtttgatcttaggttcaattatctttggttttggagctgatattattggtagaaaattagcttttaattcatccttattgttatcatcaatatttggatttttgacaggtggtacatcaagttatgcaatgtattcaatttttatgtttttatctacagttgctgcaggtggtaatcttgctactgatgttgcagttttcatggaatttttaccatctaaatatcaatatttaaatacatcaatggcagcttggtggggggttggtcaaacaattgcttcattaatttcctgggcctttattccaaataattcttgtaaagaagctttttgtccatcatcagaaaatagaggttggagatatgtttggtatactaattcaggtattgttttaggtgctgctcttttacgtttattttatttaaagcttgatgaaactccaaaatttttggtttccactggtagagatgaagaagcatttgaagcaattatgaaaatcgcaaatcaatacaatagaaaatgttcattaactttagagcaattgaaagcatgtggtgaaattgaacatacttattttgattcaactaaggcaaggggtattacatcaggtttaaaagaattatggagaactactaaagttaatttaagtattttattttcaagtaaaattgttattagatcaacaattttaattatgatttcatggatgtttattggtatttcatattcagttttctataatttcctttacatttatattgcatcacatggtggtaatacaggtaatacaccatatttagtttatagaaattcaacaattgcaaattttgttggtattttcggtccaatattgggtggttggttaattttattaccaaaatttggtagaagaggtacaatgatatttggttcactttcaggcatggcaattttatttggttatacaactgttagggatgcaagtgcagatgcaggttttggagctgcaacttacttctttatcaatatctattatgcttgtctttatgcttatacaccagaagttttcccaacaaaggcaagagcaacaggtgttgcaatttgtttagttgctgatagaatttcaagttcatttgcaccagttatttattggtatggtgaaaaaagtgggtccagtgttccaatttgggtttgtggtgcaattattggatgtttatcaattcttgcattctttatgccatttgaaccatcaaagaagagaagtgtttaaataaataccttttataatctttttttaatatataatatatattattcttaatgttcctactttttcaaataagaaaaaatccagtttcctttctaacacgtttaacagaatttatccaagaatcaccagtattccaagtatcctttaaaattttaagaacatcaccagcgggagcattaccacctaaaaattgaatattaaatctttcatagaaaaaatcacgatgatccccatcaattgattcacaagctgcaacaaataatgggaaaactgcacaattttctgtattacttgcagattctatatcgtttttaaaatatttataaactttaccaaccattttttgaacaattgaattagatcttggaattttgtaaactcttctatataaatgaataattcctgaataataaaatacttcatttacaacatttaataaatgatcagattctgttggatcattttcattttttttagaagatttaaaagatttataagcagtattaaattcaaattcccattcaattgcctttgataaaatttcagttgaaacagttttctgatcttgattttcatcttcctctaccatatttaaaattggaattaatttatcgaaaattaaaataaaattaatatcaaaacctaagaataaatcaatttttgatttggattctaattgataattagtgaaaacaggatttggtctataaggcattttaaaatcttttggagaaattgccatcattataccaataatttctaaataaccaatccaattaattaaaaaatatgataatggattattttcttcagatattaaatatttaccatttgataatttaataactttatcatcattttcaatatatttatggaaactatgtctagctaaatcaataatctctttatatctttcaatttgatttcctgaaaagattttttgaatacataggaataaagctgtaatacaagaaatttcactttttaaattaaaattagtgaaaagtctatataaacctcttgaagttattgtttcaattaattctaatgagaaattttcatcaaataataccaaacttctatgagttaaagcatgtgcaactaataaatccattaaacaattattttttttggcatattgaggaattaatacatgcattgggttatctttataaagtttaggtttagcacaaacaatgaaatgtgaagtaaaatgaacaaagaaattaaatgcatcattataatatggatgatctaataaattttcaggtaatggtagtaatggaatttcacttttatgtatgaatgaagatactgtattttgatctacattggtattgataatagtttcatcttctttcttatctttctcattatcattttcatgagtatcattatgggtatcatcaatattattactattctttaatttattaattttcttcctctttattgggaaaacattaatatattcatcatttttatcagttttttgatcaacactcaacaattctctatctttaataatcaatttctttttattctctgcaagtttttgattttgaaataccatttcaaatgaataaatacatgatataccacgtttttcacatcttgaacaagttggttttaattcatcacatttagcctttaattttttacaaccattacaacccaatcgacttctccttttagcaacaggtgtggatttcttcatagtagatataattgcagttacagagacactatctatcgcatactacacactgttgtccaaagaagtgttgatcaattgataaaagataacaaattcatgacatgtatagcaaatcagagggttaaaaaataggacttccgacgggtgcaccgatgtcataatttaactaagaattaactctgtgattgattattaaggcttattacagtctcttcttatatgtacaggacaatgacagatagagagacagatacagccggtgcatcaccatcagaacaactgctagaggcggcacgtcgaaacaatgttgatcttttacatgaattattaaacaaatatcaggataaacctaatgaggcaattgaattaattaattcagcagttgatgcagcaggtaatggtgcattacatttatctgccaagtatgggaattatgaagtaatggatcaattattagatttagatggtgttaatgttaatataagaagtaaaatgaatggtaatacaccattacattatgcagttttatattcatttgaagatcaagaattttcattatttttagttaatgaattaattaattgtggagctgattgttctattaaaaataatgataatttaaaacctattgatataattggtgattcaaatccggaaattaaggaagctttagaatctgctcaatatgcatctgttatggattcaaatatagatgaaattgcagatggtgatgatgatgaagcaagtgatgatgatgatgatgaagatgtgtgatttatatgggtattattattattattattatgatcactggaaggaatatagatttttaagtttagaggcatttaaagaacacacaacacataacgcacaatgattatttcaaaagtttagcatgtagtagtgtatttatagtattatcattactttatagcacttatactagtattaaagaacaaacaaattaacagtaaagtcctaactattagttataataagacccgctaataataataggaattgcctaatcgggtaacgcggtaaatttgactcattttaaaaatttccaattttttccaattttttcactttttttaataaaattgataactgattggccatttggttggttgttggttgttcagtgatttttttctctacttgtttgttccttttttcattatttctctcttttttttttctttttctttactcttcttctttcttacttatcttcttttagtatcatagattaatatgccattagttaacctgttgaatactgtgaaaacagcaactgtttataataacaagaaattttttgcattagttgcatgtaatccaattttaagaactaatgtttcaaaatctattaataataaaccttttacctcatcatttaaaagaaattattcaactagatcaacagttattcaattattaaataatattggatcaaaacgtgaagttcaacaatatttaaaatattttacatcagtttcacaacaacaatttgctgttattaaagttggtggtgcaattattacacaacaattaccacaattagcatcatgtttagcatttttatatcatttaggtctttatccaattgttttacatggtacaggaccacaaattaatgaaattttagaaaatgaaggtattgaacctgattatattgatggaattagaattactgatgagaaaacaatgggagttgttagaaaatgtttccttgaacaaaatttaaaattagttacagctttggagaaaatgggtgttaaggcaagaccaattacaggaggtgttttcaatgcagaatttttggataaggataaatataaattagttggacaaattaattcaattaataaagaaccaattgaagcatccataaaggcaggtgcattaccaattttaacttcattagcagaaaattcatcaggacaattattaaatgttaatgcagatattgcagctggtatgattgcaagagaatttaaaccattaaaaattgtttatttaaatgaaaaaggtggtattattaatggtaatacaaataataaaattagtgttattaatttagatgaagaatatgaaaatttattaaaagaatcatgggttaaatatggtacaaaattaaagattaaagaaattcgtgatttattaattcatttaccacgttcatcatcagttgcaattattaatgttgatgatttacaaaaggaacttttcactgattcaggtgcaggtacattaattcgtcgtggttataaattaacaagttatgatgatttaaataaaattaatttaactttattaaagaaaaatttaattaatgaagttaatgatgttgatgaatatttatcaaatttaaaacctggtaatttccgtatttatgcagatgaaccaatggaagttttagcaattgttaaaaaatcagatgataataatattgcaaaattagataaattaattgtttcaaaatctggttggttaaataatgtaactgataatatttttaaattattagaaagagatttcccaaatctttattggattgtttcagaaactgatgataatatgtcatggcattttactaaatctcaaggttcatatactaaacctggtgaagttttattttggtatggtataaatgatttaaataaggcaagtgaattaattaataaatttgttggctctaataaagttaatgaaagtaagggaagtaatgttttctctaacaaaacacaaactagatcattccattcaactagattagttaatgataagaaaaaagttgcacttattggagctcgtggatatacaggacaaaatttaatttcattaattgataatcatagtgaattagaattatcatatgtatcatcacgtgaattagcaggtagtgaattaaaaggatataataaggaaaaaattatttatagtaatttaaattttgaagatattaaaaatattgaaaaaaatggtgaaattgatatgtgggttatggcattaccaaataaagtttgtaaaccatttgttgaatcaattgaagaagtttccacaaagggtaaaataattgatttaggagctgattatagatttgataaaagtggtaaatggacatatggattacctgaattaaagggtagagaaggtattaaaattgccgataagatatctaatcctggatgttatgcaacatgtgcacaattaacaattgcaccaattaaggaatatattaataaaatgagtaaaccaaatattttcggagtcagtggatattcaggtgcaggtactaaaccatcacctaaaaatgatattaattttttaaaggataatatgattccatattcattaacagatcatattcatgaaagagagattggatttcatattggtaatccagttagttttatgccacatgttggatcatggtttcaaggtattgcaatgacagttaatataccattagttgaaaatcatggattaacaaatgaaaaagttaatgaaatttataatgaatattataaaggtgaaaagttagttaaaataattggtaatgaaataccattagttcatgatattagtggtaaacatggatgtttaattggaggatttaaaattagtgaagaaggtgatagattagttattgttggagttattgataatttattaaaaggtgcaagtacacaatgtttacaaaatattaatcttgcacttggatataatgaatttgaaggtatcccatcattttaattgtgtattttatataaagtgaagtatagtagagtatagtaagagatatataatttttcagttaattacgtgaaatttaatttttcatttcatttcatcgctttaagtttatttagtatttataattataattatcttccttttgcaatagaatgttatacagaatagggaatcctatgcagggtattcgacatgttatgagagtgaatcagatagtcttctgtaggagggttcatgatgataaattgtcattgttgaagagtatactgaataatcctcaaagtggtaaagaggaagttaaggatagagtgaagtatagtggggataataatagggataataaatatcgtaataaaagagatgatagagatagaagtgggtataagaagagagaagggtatgttaaaagagaaggtaataatactaaatatggtaataaatatggtaataaaaagtattcaaggaatgataaacaagaggaggtacgtaaggatgaagaaacgttattaaaagaaaagcgtattaaggaaatacaaacagttttcaatacaggtaatgatagagataaggaagcagctaagagaattattaaggaagtacttgaaagtaataagaaaggtattgttcaaattattcgagaaggaggtaaagttgaatattgtcatatttatgattcatttggaggtatgaaattaaatgagaaaggttttctgattgttggtaatagaaatgttaaaagtaggggagaaaatgatgagaatattgataaatttagtttagaggaaggtgagaaagtgattatattaaaagttagtgatagagaacaagttattaaacaatatggggattatttgaatggaaaagtagttgagatattgaaacagagtaacagtaagattatagagaaacaaactagaggtaaggagaaagagagtggaggtgggggaggtggtggattaggtagtaaacttgtacaaattggatggaatataagtagtaatgatttaatgggacaaaagagatttgaaattgagagtcatttaaggagaggagatgatattgatattgtaattgatgatagagaggtattagataaggataatcaatttggtaataatggtaatgatagtaaacaatttgataatattgaagaaaagatggtaatttataggaatagacgtaaagatataaatgaagttgagagattaaggagaaagaaggttattagtaaattaaaggagatgttaagtaatgttgaagggttattagagagtaatgtgggggaggagagaggatatttagagagtcggatagttatgagggttaaaggtattaaaatgaagagagataaaggtaaagaagataagaaggataagaaagagcagagacagatggagagacagaggaaggccgagaggaatgcacagagaagactggagaagttgaaacaacaacaggagaagttaaaagagattgtcttgtaatatagtcataataataataataatactaaatacatgtaaatacttacgtaatacaatacttacgtaatataataataagcgatatatccgtagacgcgaccatttcggcttattccccatttaaaggtctagttacccactcttattattaattagagttattactattagttgataatttttcacttatttcttaagggaagtacctttaccttctacttctttttatattggatatcttatctttactgtatccaatacacaaaccacatgtcacaaactttagagatagattatgaggcattacccgataattcacctctaatgtcacaattaattgcaggggcttttgcaggtataatggaacatacaattatgtatccaattgattcaattaaaactagaatgcaaaccttaaagattaattcaaatgatggtataatatcatcatttaataaaattagtgcaaaggaaggtcctttcgccctttggcgtggtgtttcttctgttatattaggtgcaggtccagctcatgctatttattatatggttttcgaatcaactaaaactactctttgtaataatttattaaatcataatcataataataataataatgatggaaatactaatattgcaaatattaataatattaataatatatctaattttattgttacaaatgaaaaacatccattaattgcaagtttaagtggtgttgctgcaactataacatcagatgctttaatgactccatttgatgttataaagcaaagaattcaaaataacaaccataatatacaaaatttaaaatctatcatcaaaacttcaaaatttatttatcaaaatgaaggtttaaaagctttctttataagttatccaacaactttaattttaagtataccatttgctgcattaaattttggtatttatgaattttcaagtgataaattaaatccaaatcaattatataatccaattatacattgtatatcaggtggtatatcaggtgcatttgctgctgctgttacaactcccttggattgtattaaaactattttacaaactaaaagtttaccaaattcaaatagtttattaactgcaactaatgcattatataaccaaggtggtatatgggctttctttagaggtttaaaaccaagagttgtatttaatgtacctgcaactgcaattagttggactgcttatgaaatggcaaaagcttatttactgtaattttaatcttatattatacaactttcctactaatcttactcttactctctctcttttacacttgttaaatagtttatatagatcttttattttatataataccaatcatacactttttatacaacttttgttgcaataaatgaaaatacaacactaattgttataaatcctataaaattaaagaatgctaatcttgaataagatctctcctcctcttcagttctaaatgatgcaaatatattcctcagactttgaaacatgttcatattgatacttcactatacggaataccggtactggtactgaaagagaaagagaagttgtataaattaaacaaatttcgctctttctttaaatgaccgcttttcatctactcttcccttctctttcttatctcttcccctcttatctctttttatcaaagttcttttacaatgaaggaaggtgcattacacagagaatggagtctctggaatcaattgaaattgaataaattgaataaattgagtaattcaaatgttacttatgatgatgttaatgatactaccccggtcatctccgataccaataatgatattaaatatgattcaccttattcttatgatgaaaagaaatcatcatctcttatcaaaaataagacattcaaaactattagatggttgactgtttttctaattcttttctggactatccgtaatttaatttcataccctttcaaagatttacaacaaacaactccatgtcatggtaacaatgcaaaagataacaaattaaccttttcaatgaaaaattatcaatcaattccaatgaatttccatccacaatcattgaaaaatgtctcatcccctcatgaagtaattgatattccattttctccctacacaaataattcattacctgtttattctcatcaacttttaaatcattcatttggtctctcttggaataaaccaatcttagttaaatattctccacctccttcaaatattacctataatagagttatctttactttagatactttaattgatggtgttcaatatgatagattaattcatatttatttaaataataatgaaatttggagatcttcaacaattgaaccaagtggtaaattatctcattcttatactgaaaaggatatgactatgtattctaaattattccaatcagaaggtgatttattaattcaattagataatataattaccccaaaattaacaggtaaatttaatatatctatttctgcattatattttaatgaaattgaacatccaattaaaaatatctcaggtggtaagaaaaatagaactttagctgatcaccctgatttaattcctttaactcctaataaatatggtgtacaatatccacctatttcatattatccagattcaaaattatcaatttcattacctgaaattaaccttaatacaactcaattaatggttcttttaacaacttcaggtaatgcagcagaagaattttggtattctaatttaatggatcaatataaagattcattccttgcaaataatcgtcatttttatggtcatggttcttgtagaattattaatgttttcattaatggtattagagttcattcaacaattccaaaaccttatattttctcaggtggtattgcaccaactttatggaattcaattgtttcaactggtagttttaatataatgccatatcatattgatttaacttcaattataccattattatgggattcatcagctgaattagaaattgaaatttcaaattgtttagatgatgacgataaaactattgttaaatcaagtattggttcaaattggattacttctgcttcattagcaatttgggaagatgaaaatattgataattcatttggtgatttaaatattttcgataattcaactgaaattaaatcatttgcaattaatccaccatttacaggatttttaactcaaattattaaagcaaattatagtaatattttacaaagtaatataactcatgtttataaaaatggttcagaaattagtaatttaagaaattatgaaaatcattcaaatgaaacttcagttattataattaataaatttggtgataatcaatcattaatatttgcatcaaaatcaaatacaacaattaatgaaattgatccattttctgaagatatccttaaagattttacaatgttaactaattcagcattagcaacttcattaaaattcactccaccaaatgatgaagatacaatggttgatcctgatgatatttcatttagtactaatgtttcacttagaattgaatcaggtgcttatgaacatttcataccattagttgaaattaaatcaaaggaaaatggtactgctgattttacaatttctaaaaatggtaattatggtacaggttctatgttacataattatacattatcagatattagtggattaaaatataatagaattgcattagctgaaaatgatacaattgtttatgataatattactgaatcagattcaaagtcaacaattaaaacttcaaatcatttaccttgtcatggaaataattatttattaattaatgaattaggtttaaataatgaagaatttgctgaacttgaatcaattttatcacaagatgaattaaattatcttattaaagcattaattgaaaattaattttaataattttatttaaaacattctttttttataacctttttacactttttatactcttactttttacaattaaatttttttccatattattactaaattaaacaaaaaaaaaaaaaacactatagaacctacagaaaagcaaagataactgattgtaaacgattgaaaaaaaaaagagagaatgaaaggagaattttaaattattgtgattgacgactatcttttgataattgttcattattagctgaaccattatctaaatcttttgtatacatttcaatttctttccaaaattgttgatcatcctttgaatttgcagtatttataccattatttgaaaaatctctaataatttgcttttcaggatcattaattgtattcggtaattcactttcactaattgaatttttatgataataatcagttggtgaactaacaaatgttttattatcttcacctgatgaattataaattggtgattgagaaattgatgttggattactattcataattgaagaatttgcccacattgttgttaatggtaatgaaattgtaattaatgcagtaccaagagctgaaaatgcttgtgatgaatattgatcagtttctgaaaatccattaaatgaaattaaaattaaaattgttggtataaccattgtttgaaatgtcataataaataaaatatgaaataaattaaattgtgttaatccaagataacgacgtgtacgaattgcaaatgcaagttttaataataacataagacaaattgcacatgatgatgtaacaaataaaattaatggtgtattaactaatttttttggaactgtaacattattattgtaaaatgctaaatctgaataaaccatataaacaaaatataatacaaatgatgcaatacctaataaaattgaaattaaagttgcaatatatccaattcttttcaatgatttttgtggtgaatcaaatataacataaacttgataacaaaatgatgtttcaactaatccaattaaaataacataaaataaattagcaacaactgatacattacttgcatttttatcaatattttgaatacctgaaaaattatatccaattgtattataagttttaactaatgtaactgcaaataaacatgattgtaaaaataaaactccaagacatgacatattaagtataaatattggagattttttatttttagtaaccataaatgtaactggtaatgctaatgctgataatccaattctagttccaaatataatacctgtaacaacaattgtcttcatataactatcaagtaaacccattgaaatttgcatatcacccatagttggtgatgtaaaatttaataaaatttcttctggattatcaagtaattcagatgttggaaaataatcttgtatattggacattgtttaaacttattattccttttttgattaataaatgaaaagctaatgtaatttatttgaaagattcaagattttgtgaaaaaaaaaactggaaatataccatctttattgcttatattgaattaattaaatggaaatctttttcatttaaacgttttcaaaagaaatgaatcattacaataattatcagtttcatgtatgaaaaaaaaagtttgaaaatgttgcatatcaataaaatttcctttttaagacatgtcaatgtattttttcaaaacatttttttcaaacttgatcgataagaaaattttcttccccttgattaaatttcataatcattagtaaatgatttccattcattaattctcacaatatgtctcatcgttggtctaccatgtggacaattccagggtttatctaaagttgctaaatttttaacaattttttccattttcagtctatttaaagattgtccaatcataatacttgatctacaagctctcattgcaaacattgaacgtactttactaggtctaggaaatgttgtaaatgcaccatcttgttcaccaactaattgaataagttcatctaaatctttattattgaaaattgtatttttagaatatggtaaggaaactaaatgaatttcttcttgatgtgcgtcatcagatgtcttatctccattatcaggagatttagttttaaatttgaaaccatttttttcgaaaatgtttaaattatttaaaatcgtaaatttatcaattggtgtaatatctaatttttgtgacataactaatggttgattttcaaattgagtttcagatattaatctctcaaaattaaacttttcatcagatgcatgttgatcaacaataagtatatcaccagtgttttcctttaaaactatgataaaacctttattgaattgtccaataatttttaattgtaaaaaatcatttttattaattgataaacctaataatgtttctgataattccttatccataaaatctgatttttcgactgaattattctttgatgtggttttatcttcagtacgtcttcttttggatatagggaatttcaaatcgttcaaatgaattctaacttttttaggattttcaggcgaaatggaattagtatgattatcagctatttgagatgatgtatcaattagttctttttcaagaactggaaggtcatcatatacgacttcatctttaagctcaggaacaaataatgattccttttcaatttctggtacaaataatgactcatcttcattattattctcatgagaatgtgaacaacaagagtgaggactatgcttatcttttgtttccatattaatatcgacatctatattttgttctgataaaaaatcttcgtttttcatactctcatccctagtatcatttctcacataatgatttgcaataattgaacttctatcatcaataaaattatcagttgaatcaatattactatcaatattctgactatcttttaacactgcagtatcgttaatactttcatcatcaacaatatcatcaaccaaaatttgagaagtttcaataactcttgaatttctaattgatgctctttcaacaacatcaatttcaaaatcatcttcaatttcaatattaacatctgtatcaatattattttgtgatgaattatcttgaactaatgcaaatgaacttaatatttgttgagaatatttattaattctttgagaatcatcaacttgatgtgaattaaatggtaaactataagtaccaccattataccaaaaatcttccaacaatataacaattttttcaaaaagtaatttttcaaatttatttgaaagtaaaatagttctcttatcaggagttacattaatatctaataaattttcatttatttggaaattaagcataatgacaggattctgtaaataattcatcttcttatatgtttcatttattaattttaataattttttatattcaacaggtctattatttatgaatataaattgtctatcctttgtcaaacgaccatcaccaaaagatgcttttgatatcataccattcattttaaccatataatcattatttaattcaagtgatttatcaatttctgttaaaccatctaatcctgacgacccataaacattaattatattatctttgatttttttattaccacttgttttcaaaacaacttttttcttacctgatatatcaatattagtaactaatattctaacattagttaaaataattaaataagatattaacatatcaatacatttttgaaattctttcctatacattttttcaaaattaagtttccttacaggtaagtctttgaaaatttcagtaattttaacacaggtacccttactttgattaaccatttttttatttaacaattcaccactttttttaaatgttaattcccaaccctttggtgcttcagttgcaatcgaagtcgttatgactatatcactaatattacaaattgaattcaatgcttcgcctctaaatcccaaagttttaacactaattaaattttcaaatttctctaatttggacgtataattcttcaggcaaatattattaaaatcttcattacttataccatcaccattatctaaaatttcaataccttcaagtccatattttttaaaagtaattgaaataactgtagaatttgcatcaattgaattttctaataattctttaacaagacttttaatttcagttatgacttgtcccgatgtaatgttatgtacatcatcggtcgatatacgattcatcttcattgcctaaaagaaaatgaagtagtatataattatcaaaataaaaaaattacgcgtaatataattctacaacatgaaaattccaacgtgttttaatttatcaccaacttttttttcttgtgtttcttttaaaatatataatggcagataatctaacacccagtgagttaattgatgcaataacttcttttctacgagtgattattgaacaattatggtatcaaattgaagtttatccaagagaatcatttgaatcatgtattttttatgatttagaagttaaaacaacaagacatccattagttaaggcatatcttgatgaatttattaatagtattacaaatttatttaatgatggaatcataagtaagatttatttagaaatatttgagaataatagtttaaaatattcatttggtataagtttcaataattcattaattttggatcaattaaggaatgattcacaatttttaaaatctgataaattaaatgatttgtttaatacttttaccatagttaatgaactgaaaagtttattatattcagttattgttgaatcttcaaaattatctaaaattgaacaaaattttggagattttaaattattattagcaactactgaagatgaaatggtttcaagaaatcaaaattggatattggataaaagattgaaacaacaaacagccgatgatgaaagtacacttaatgatgtagatttatatccattgaaagaagttcatttggaatacatcaatattcaaggatacattgtatcatataagtaatagaatagaaaaataataatacagttaaatatttttataaatacaatatacaggagcttaaatttagtatcaacttattttagatatattcttacttattagattagccttatccataccaccaatactccaatcttgaacaattaatataataaaccaaacacatagcaaattgaataaattatgcaagaaatataaatgtcttgtaccaaacaatagtgaataaatcataaaatataaaagaacaagctgtgttacaattatattaaaatcagtctttggtcttggaatcatatacccttgatttaataattgaataagtataactattggtaaaattgctaatatattatgatgagatgaaaatggtgtaatccatctaatcgatatatcatgaatccaaacaattaaaacaggtacatgaattgcaactaaccaaaacattaacatcatcaatgaaaatttgaaatttttgaagttctctgttaatatcaataatttttcctttgttataaccttatcttcatttatatcatcatcactattactattagaatctgaacttttttcctttgaatgtgtataatttttaaatacacttgtagaataagcatttaaatttggattggcaataaatgaatttaacgttgaaaaaacttgggttaaaacacaaacaataaatgcaaattgataaggtaaataaattaaaacaagcaaaattaatgaaataacactaatagttttcctttgctttgaaaaatttttaaattttggtaatttgactgatttccaaattggaagttttgataattggagtagtaatattaaaactaataatattaaattgtaaagtaaaaaatttaatccaattgaaatatataaaataaaagttccataaaaccataatgaaatttcttcaattcccataaaaatattattaacttcaactttacttttctctatattactcatcaaatctaaatgattaatctctaatggattaaatatttcaataaatttaccaaaacttaatttggttgatgttaaaaatgataataatgaaaaaataattgataaaattgtaattgttttcaaactacaaatatataacattgtttcaccatatgaaggatatttattatattttgtatattgaataaattgacataaaataattaataatgtaaaaaataatgggaatccaataattgataatctatatttaacaactaataagcttaaacttttaaaccaatcaactgtaacataaatatccattatttcgtcagatgataatgaatcagtaaaaattttgaattttgaacttgaatttaaatcattaacaataaatggcgtatacggagaatttgaattgaccattgaagttatatgtttatttgaatcgatgtcaatatgccatttaacttcacctttaacagattgacttataattggagaaaacttttcattgattgattttttatatctaatatctaatctataagctaacagacttgatctaattgaaggtatatcaatatcaattataattggtctatgaacaggtattgttatatcattaccttgactaattaatttccacaaacttgaatcacctgcctttagtttactcaaactttctaactgtaaatcagctaatacaaaatcatcatcactcattatatcagatacatcctcagactctatcataattacattattgaaagaatttaatatatttgaaggtaattctaatgaataataaactttattatcagtataagataatggaataatgtatgtatatttattaatatcaatgcattctaattcagcaaatttcattgtatcatcagttgtataatcatatatttttttataataatttttatctctaatatcttcattaagaactgatctacataataaaattgaagttgaagttgaatcatctaaatcttctattgaagttggttttaatgaacttataaaattaaatttatagttatcatcttttggaatattaaataaattaattggaggaaatgaatttaaatctctctttatatgattttttggtagttgaaaaaatctttgattggttgaatctttcaattgctttaaatcaattttcaatttataaggtatatttaaacctagttgagtatctgaaattatatttgatgatttggttaaattaggtagtaaaattgatttaaaaatttccattctcttatttaatggataagtttgagattttgagtttttatcaacaattgataataaagttttagataaaactttccttaattgatcacaccaaacaattgccaaatgatcaattggagtccaaacttcaggtataccagtcgttgaaactgagaatccatggtttgaaggaactaaaccagttagtgttgtataatcagttggcaaagttgtatctaacataccaccagttattgaaattaatgatacattagataatctttttcttgcaattttatttaattttaaaattttattatgcttgttatgtttgttatgtttcttactaattttattatgaatattcatatcaatattttcaatttcatcatcatcattttcatatgcaaaacctttcatccaaaattcatcagttaatttgaaaacatttaataaatctgtttcaaaagtagttggagcggcattatgaggagttgataaagttataattgtattaattgaatcttctaaataatttggtaaacttaacataactctagcaactataccacccattgaatgacttaaaataattactgaagttggataattatcatttgaattatcatttgatttatacaatgataaaatgaatttaactgcttcatttaaatattcagattgatctagcattgttctaccatggaaagcagtaaaatcttcattaaaatctgcagtgaagaaatccaaattattagtatttggatttaatgatttaatactattaatattatcaaaatattgatcagcagtttcagctgcaattgatctaacttgtttataactacctgcattaccaggtataaataatactggtgtaccagttaaattgaaattttcatttttaccaggcattttatccttcccctgttctctataaagatataatgaatattttgaagcaaatcttgtatatgatgaatcaaatgcacgtattttagcataagcagggttcatataaacacctttacaataaggtgaatcagcacctgaaaatgggattgtgaagctaaatgcaattaataacattgtgaataaaccaattaaggaagttgttaataaaactgttttatttgatacataatttgtattattattaatattgttattttttgattttgagttatatttttcaggtattgagaacatgatgatttattttaatgtatgataaaaatgtcaatatggattgtgtataaagttgaaaaatgaaattaaatatgtaagaataaatgaataaataaaatgtttatagtgaatatatcaatagtgaatatatcaaaatggaatttgaattgaaagataaaataaaataaaataatgaattaaattaaattaaaaagaattaaaaaatacaagaacaatatgaatagtagataatgtaaatgagtgaatatagtgagaaatgtaactatatcagttgataattggtatatgatatgatatgatatgatatgatatgatatgctatgatacaaataccaacagaaacagcacaaggtaagagagataataatcaatccaatactgttttagtgtagtataagcaggtgtattatgataatacaattgccaaatgaaagcaaatgaaagcaaatgaaaggcaaaagaagaacactgaaaagccttcaaagccttcagagccttcaaatccttcaaaagtaatgaaaattgaaaattgcccttttttcattcatcaccttattaaaataaatttgagattttaatattaaaatatggtgatgagccacataatattccaccgacgcaccgaccgccttttttctaaattacccggcatttttcctattttttttaaatttttcagtagagactacatgaatggacgttgaattggttagatattagatattagatattagatattaatctggtattttcttattttagtaggcaatcccattttcattatataggcatacatcaattatgacaaggagagctcaaaacctcaattctttagttcgtggaagaattagatcttctatgaataaatataatttatttaatttatataaaaagaataaaccaaattttaaaattatgactttatatcaacaaaaatgggctgcaaagcaagaaactagaggttatcatggtgagcatattagagaagagagatggcaatcactttttgaaaaaaaattagaaggtgttgctcaattagatgcttcactaaagggtaatgttccttcaactccaatggttttacaaacttttgcttcattagagaaaagattagattatgcagttttcagatctttatttgcttcatctgttagacaatctaaaaaattcattcttaatggtcatgttaaagttaatggtgttataattaaacatcctggtttcactttaaatcctggtgatatattctctgttgatcctgaaagagttttagaagctttaggtgctaaaaaacctgcattaaaggaagcttataaagttgataaattacaagttattaattggcaaaaatatgttaaatcagttcaagaaaatccaagaaaagcttgggaaaagaaaatggaaaaatcaaataaaattaattctctttataaagattataatgttgaaggtgttttaaagaaaaatgaatctgattttgatcaaagaaaaaccgataatcaaaatgttaaacttactaaaatgaaagaaattcaaaattcaattaatagaaaatcaattcttagagatataataaagacaataccatttgattcaactgaaaaagtagaaaattctgaaccttttaaaaaacaatttggtgataaattatcactaaaggcattccaaatttatcaaagcttaccaacaaagataactaaattacaattagataaagatattaatgaggaaataaataaatttgtaccaacttttaaagatggtcaaccaatcggtgaagtttatgaagatactaattctaaaaaaattagatctcaactatctgaacttcattctgaatatttagaaaaaattagagttgattttgctggaaaacctttagcaactgatgaattaattaaaatatggagtgaaaatatcaagagacatccagttttacctccatttagtgaagttgaagaaaaaggttcatactatttaagtttaccatggcaaaaaggtatgtatggtttacttgatccttcaaaatcttattttactccttggaaaccaagacaattcttaccagttttctcaattttaccaaaacatatagaaatttcattttcaacttgtcatgctgtttatcttagagatcctgttgcaagacctggtgaatctgaagttatctctccttacgatgaagatattcatgaaagatcttacatgtattacattaaaaatggtatgtaatgcaatctaatgtatgtaaaatttaatataaattctgtatataatgaaaagaaaataaaagaaaaaaatataaaattcttaaaacccacttcacttcgcataaaagtttcattgatctaaacacttctttttacttcttcatgtcaaaatcatctcttatcagcttattaactaaatctttttctaaagaacaagcaattagagaattacaatggattaaaaatgaattaccggaaaataagtggttaaatgcgtgtaatttaagatcaaatcatgttccattacaatatattttaggaaatcaaccatttggtaaattagatcttatatgtagagaaggtgtattaattccaagattagatactgaagattgggttattgaatcatctaaagtattgaaagatgttaaaattaatggagtattggattattgtacaggttcaggttgtattggtttaagttatgcatctgaattaaatcaagtatcgattgttgattgtgttgattttaaggatgatgcaataatattaacaaatgataattataaaagaaataaagatagtattttatgtgatgttagaatcagtaaaggtgatctatttaatggttatataccgaatgatcaaatctacaatacccacactaacaataatttactagtttcaaatccaccttatataccattaaaggatcttcatactgatgaagttgaagaaagtgttcttaaatatgaaccaagagaggccctattaggagatttagaattttatgaagcattatgtgaaaatattcttttaaaaaacaactcatttaatggatttatttttgaactgggatatatttcacaagtcattaaagtaagggaacttttaaatccaaaaatctggtcaattggtataagaaatgatagtaatggtaaattaagaaatgtgataggttggaaaaaacaatcaagttttaatgtattacaaaaaattgtacataagaaaattctataataatatttcaaatctaactagattcaacatcaggcgttattgtttcagctgcaatttcagcaattggagttgattcactatcatcatttacggttgttttagcaattttcctctttttactacctctaccaactgcaacaacattttcaatagggaaaactttaataccagttaaaataaatccaccatcacttcttgatgtcattaatggatgaattctaccaggaattgtttgatattttctaacaactgtatgatgaatatttggtaataatatattcttttgtcttaaaaacatatgatttaattcaattaacatttccttaaattgattatatataattaatggtgatgaaccacgtaaccttggtaatatttttggtacaaatgttgcactatttaatgttgatgcatagattaaactttcaaaatcattttgtaaaactctatcaattacactattaacaatttcagttctttttactttcctttgataatgaactttcattgcatctgataattttgaatattcttcatcagttaattccttaataactggtctctcctgttctggatataaaaattgtaagacattaatacattgaaccatacttgttgggcttgttgctatttcatttgcatatcttgtcttatttaacagatgtatactaggattatcattttcatgtattaatgtaattgtacctctattacccattttctctaacattgcataaactattaaacctccagtttcatccaatactaaataattaccacccggcataacattacctaaactcatcattaaaccaattgtttcaatacttaaattcatgattttaaaaggttccttttcatgatataaatattcaagcatttcatttgatgttaaataattaatttggaaacgacgtaaaaatttcttatgtttacgatcaagatatttctcttgtgaaaatgctgtctttttgtcaaatgatgaatgatttttaatcattgattgaataatttcttttgcaatttcattaccaccaactttattcttcatttcttcaatttcttcaactgttaatttttgaacatttgcttcatcaactaataatctattatcactacttgatcgatttgataattcttcattatctaaatctgttaaatctgttaatccatcttccaaactcttgattggaattaaattattattttcattaccaatttcaaatgcttgtccatatggatatcctaatacatcaattatattgaaattaccaaatttacccatattaattacaccatctgaacgtaattgtattaattttcttgaaccggatggtaaaaccaatattgcccattcatcctctgttatatttgtattcggtctataatccttcatccctgtgtcctgttagttcgacctcttaacctactgtatacttttattatgaaaaaaaattattttaaattacccaaaatgtcagcactgaaaaatatttttttttctttctgcatgaaaaattttatcaatttctattatcactatagttattgtaggaaccttttatcattacatcctttctgttacaacactataaacgacaatgggtaaaagagctagagagaagcaaggtgttccaccttcatatgaagaatttcaagcggcaaagcaacgtaaggaagacaaaaagtctaagaaagattctaaatctaaatcaactgaaactgaaactaaaaattcaaataagaaacaaaaattcgataataaaaaggatcaaaagaaggaaaagaatggtaagaaatctaagaagagtaattctgaagatttagatattactgaagctccaaaagatttaccagaagttaattatgaagaattatcagctgcaagaaaatcacttttcgatgatgaatctgatgaagaagaagaaaacccaactagaccagaagatgaatttgaaactcttgatgatttagatgatgaatttgatattgaagatgaagctgatgaaaatgatttacatgaaaagccaatgttctcagatgatgaatcagatgatgaaattgaaaaagttaatgctgctaatatggaagaatattctaaacaacttgatatggaaagagaacaagaagaattagaagcagaagaggaattattaggtgtaaatcaagttcaacctcgtgctaaaattttaccaccgccaggtgaacaagatcctgcaagtgaaactaaggatggtgcaaaagatttaacatttattagaactagaatgttagaaattgttaaagttttagaaaattttaaagatttagcagaagagggacgcaatcgtagtgaatatattgatcaattaatcagtgatatatgtgattattttggatatacaccatttttagctgaaaaattatttaatttattttcaccaagtgaagcaattgaattttttgaagcaaatgaaattcatcgtccaattactattcgtacaaatacacttttaacaacaagaagaaatttagctcaagcattagttaatagaggtgtcaatttacaaccaattggtccatggactaaagttggtttacaagtttttgattctcaagttccaattggtgcaacacctgaatatttaagtggtcaatatattttacaagctgcatcatcatttttacctgttatggcattagatccacaagaaaatgaaagagttttagatatggcagctgcacctggtggtaaaacaacttatatatctgcaatgatgaaaaatactggttgtgtctttgcaaatgatgcaaataaggcacgtaccaaatctttaattgcaaatatacatcgtttaaattgtacaaatacaattgtttgtaattatgatgcaagagaattcccaaaaattattggtggttttgatagaattttattagatgctccatgttcaggtactggtgttattggtaaagatcaaagtgttaaaactaatcgttcaccaaaagattttattgatattcctcatttacaaaaacaattattattaagtgcaattgattcagttgatcataattctaaaaatggtggtgttatcgtatattcaacttgttcagttatggttgaagaaaatgaatcagttgttgattatgctttacgtaaaaggcctaatgttaaattagttgatacaggtttaacaattggtaaagatggttttacaagttttagaggtaaaaaatttgattcaagcgttaaattaactaaaagatattatccacatgtttataatgttgatggtttctttgttgctaaattccaaaaaacaggtccaagtccattcgataaatctaagattggtgcatatgagaaggaaaagatggcaagagaagaagcattaaaggaaggtttaattgctgatgattttgctaatttcgatgctgaagaagataaagaaattatgaaggaaaatattgttaagaatttagaaaagaagggtattgacccaagaaagattgatttagagaaaaaattagaaaagaaagattaaacaaagttttaatttctctttgaatcaaattaattaatttatttcttttctaattaaccaccataatttatgtaaataatatagtaacatttttttttatatacaattatacaattaataaatataatacgtacaaaaaagttttaagtaagttttatacaacctaatccattctctgtcatgtaactaacaccaagttcttcatattgttgtttagtccaaaaaccttttaaattattatttgaataatcattaaatgcccatttagacatacctctccaagcatctaatattggatcatttgcaattctaacattaaaaggtctatcagatggtaaaccagtacgaaattcattaattaaacgttctttaaaatttgggaataatgctgatccaccagttaagaaaatattatcataaactttagcaattttttcattgtaagaattatcacctgaaaatcctaattcttgaggtaatcttcttaataatgtatcctctgcaatttctacaataccagcttgatcaatacctgaaattgaaggttgaaacataatttctggaattctaattctttcaacatttaaatggatttgatgtaattgatgttgatcttcattatcaaaatctcttggacctcttaaaaatttatgaattgttgaagttttataatcaaattgacgttcctgtgtatcatccattgtaaaatttggatcaaattctaataattgcttttcaagtgtataaatttcctctaattcctcagctgaaatttcttcatcatcaatacctgcaatatctctataaactgcccaatcatcatcatttgcaccaaaagtatcatttggatcattatcaacagttgcaggtttattattatgacgtcgtttacgacctcttctatcttcattatcagatgattgaactggcgcatcatcagctaatgatgcaatatttttcattctcatttgtgatgctttagatttacgatcatttaaatcatcctttaatttgattctatccttacgctttttaacaactttttcaagtctttcacgttttgatttgatccagttttctaaatcatcttctctaaacttaatatctttcagtctcaattcttcagcctcacgaattgcttcctctttttcttgtctagcacgtaattttgaatcaatatttgccttaattaatcttaacctacgtttctctctctgttgttcagttgttaattcggaattaggtacatctaatattgagaaatcatatttatttgcgtcctcatcttcatcattatcattgtcagtatcatttagtaattttgccttttttaaagatttttccaatgtttctaaatatttatctaaatcatcttcatcatcgaatcctgcctcacgaatagtttcaataatttcctttttacttaattcactaaaactttcctttattttactataatattcaaaatctttttgctttaattctaatttttcaattcttttcaatttagcttgatcttgtaattttttaatattttcctttcttttaatttcgtctaatctaatttgttcctctgttttttcctctttaataatttcattaaatggtgcctcaattgttatatcatgagtttcaagataatccatatctaaagttttttcaatttccttactaaaatcttttgaaacataacaatgatctttaactaattgttggatttgccaatcatttaatcttgttgggaaataaggatatttaagacctaatgaacttctcatataatcacataattgatgaccgccaatattaattctctttgaaatattatgtagtggcattgaatctaatacaggtataacataatttgattcatgatttgtacctaagattaaacctgatttataaccattttcataaaaactgaaaacagaatcaataccaaaagcaattgatggtatatcataagattcgaataacatttgagaaattgtctctctttgagataatggagctgctaacgattcattcattataattggattattaactctattatttgaattaacacctagatgtaagaatgaaaaatcaaatattttctctattgaatcccaatttgttaacatttgaccatcaaatggtgatttcatatttgccttaacagttgattcaaggaaaacgtcattacctacaaatgttgtttgtttattatttttcctatctctatatcttgcagttaatgttggataattaagaaatggatctattgtgcctgccataccaactctaacattagttttacctaaatcaattgcaattggcacattttgttgataatttgaattttcagtatcgaaaggtaataaaccttcaggttgaggataatctggtaatggataaactttccttgggggcaagttttcatctcttttagcaaagttatgagagaagttattctctgtcatagatgggttgatatgtgttgtactaggagtatattcacagataaaagagtatattatacctctaaattcactctataaaagtcaattcaccaattgctatgtaaatttccagtgtcgctaattgaataccctgacatgacactttgccacctttttaccactgcttttcttatgttttgattagttgcttctacttattataaggcattaagatatcaattgacactgcaatgtctgaaaataacaacttctctattcaaggttttaaccttgtcactcttttaaaacgtttagaggctgcaacttcacgtcttgaggatgttactgtttatcatgagcaaaatgttgcaacaatagcataccctaatggtaatagttcaccaattacacaatctacagatgctgcacctgcaattacttctgcgcctgttactgcaccagtttcaactccttcaccaatagttgatgaattaccaaaatctattaaagaatttgatttatttattgatgaaaagatcaatacatacgttgaacaatcaaataaaattgattcaattttaggtgaacaagcagaagttttcaaaaatgcaattttgaaggaaagaaatttattattagctgccagtaaatcaaagaaaattgcattagatgatattaatttccaaaattcagttattatgccaattaacgaattaattatgaaagttattcaaattaaggatgataatagaagttctaaaaattttaattatcttaatgcagttgcagagggtgttgcagttttaggttggattgttacaagtacacctgtttcatatattccagattttaaagattctgcacaattttggactaatagagttttaaaggataataaaggtactgataatgaagaaaatgcaacaaattgggttaaaagttttttaactatttttgatgaattgaagaattacgttaaggaatatcaaactacaggtattgcatttaacggttcagaagattttgaaactgcttttaaatcagttaattcaactgattcatcaactccaatatctacaagttcagttagtagtggtggtgcaccaccacccccacctccaccacctcctccaccagctgatttattcgcagaagaaaaagctaataatgcggcagcggcatcatcatcatcaacttcaacatccggtatgggggcagtttttgctgaattaaataagggagaatcaattactagtggattaaagaaagttgataaatcagaaatgacacataagaatccagaattaagaaagaaatctgttccaatgccaccaaagaaaccaaagaatttaagcagtggtaattcaaaggaggatgttaatgttgataaggttgttaaaactaagaagacaccacaaaatgaattagttgataataaatggatgattactaatgtaactaaacaagatattactgataataataatggtatgattataattgaaggtgagatggatcaaagtgtttatattggtaattgtgaaggtattgttgttcaaattaagggtaaagttaatgcaattagtgttaatatttgtaataaagttggaattgttattgaaaaggcaatttcaagtgttgaattaactaagagtaataaatgtgaaattcaagttattgataatgtaccaattattaatgttgatcaatgtgagagtactaatatttatttaagtgaaagtgcaattaatgttgaattatatagtagttgttgtactgcattaaatgttaatgtacctgataaaactaatgaagatggtgacttaaaggaattagcaattagtgaacaatttgttactagattcaccaatgatggacgtcaaaccactgaacctgttcatcatggatgatatgatatgatatcctacttatagttatttacacttactctccatgtttattgtgtagacaagaaccaaagaattattaccttttgtgagaagtcgaacagagaactttactcactttattagattacgtaacacatagtaaaatttaatttaataactttatcccgggaaagtcggagtgcggtgtcggacccggtgatttgcattttgggtgaattattggggaaaatttccagtgtaagagagtgtatgtagatagggatgtacagatagatagtagagacacacagtgtagagtatgggtcagcactgatgataacaaagagaataactaaggataacaactcggaatgtccttccctatacagtaaaattaatttaatttaatttaattactatttgaaagggcgacgttaatttttttttatggagaagtactcgatgttgatattaatttgattttataggttgttggggtataacctctacttctctttttttcttttggtatcttactctataatcaataaccacaatgcttagatcatccgcaagatcctctgttaaaacctctttaaaatctgtttctccaaaatgtatgattagagttgctgctccttcaattaaggtaaattcagtatctgcaaaaattcaatcaattgcatctccaattgcattccaatctttaagatcattttcatcttcctcatttgttaatgctcctcaagttattaaagtgcccgaaatggcagaatcaattactgaaggtactttaactgctttctcaaaagaagttggtgaatttattaatcaagatgaattattagcaactattgaaactgataaaattgatgttgaagttaatgctccagtctctggtacaattactgaattattagttgctgctgatgatactgttaccgttggtcaagaaattgcaaaaattgaaccaggtgcagctcctgaaggtggtgcagctccagctccaaagaaggaagctaagaaagaagaagctgctccaaagaaggaagaatctgctccagctccaactccaaagaaggaaacttcagcaccagctccaactccaaagaaagaatctgctccagctaccccagcttcaaatgattcagctaaatcaacttcaggtaaattacctgaaaatattaacccattcggtaacttctcaagatctgaagaaagaattaaaatgaacagaatgagaatgagaattgctgaaagattaaaggaagctcaaaatactgctgcttcattaactacttttaatgaaattgatatgtcatcattaatggaaatgagaaaattatataaagatgaatttattaagaaaactggtgttaaaatgggtttcatgggtgcattttcacgtgcttctgctttagctgcaaaggatattccagctgttaatggtgcaattgaaaatggtaatactatggttttcagagactatatggatttatcaattgcagttgcaactccaaaaggtttagttactccaattgttagaaatgcagaatctttatcaattttagaaattgaaaatgaaatttcaaacttaggtgttaaggcaagagatggtaaattaactttagaagatatgactggtggtactttcactatttcaaatggtggtgtctttggttcattatttggtactccaattattaatattccacaaactgctgtcttaggtttacatggtgttaaggaaagagcagttgttgttaatggtaaattagaaagtagaccaatgatgtacgttgccttaacttatgatcacagaatgttagatggtagagaagctgttactttcttaagaactgttaaggaattaattgaagatccaagaaagatgttattaatgtaaataatatcttttagccgtttacttcccacttaatgattttcattgtttctaattgttggataactattagaatttaatgtaactcttatttattaattttattatatataattattagtatattttattattttatttattaatatcacctattcatttaaagtattacgattgtgaagatacacgagaaaataattttttgaaattttaaatgtttacttaagtaattaatgttcttctttttaacaaaaaggttaaaccccttgaatatgttggtgtaatagtatgaataacataaggaaactagctaatttgcaaaaatacttcctatatacagacacctcaatcacaaaagcaccatattttgtttcaattgcattagaaatcgaagttaaacaaacaataaggcaaaaattaggtgaattagtaagtaatgttaataaacaattaactgaaaacagttttaaaatgaaaatgggtcactatgatcatattcaattgaattacacccaaccatcatgcaatttcctaagattggatctaccctatgaaaatgtatgtcaaattgatttatcaaataatgatgtctcaaatattgtagatcctactgaacgaatatacagacaatattttgagaatcagattattacaactggtgatttagaattagatacttggtggccacttaaatatacatatttagcatacggaatacaaacagtcaaatttcatgtaactttactacctaatgttctgttcaatgaaccagataatgcatttaagttctttcaaataatgaaaaattcaattggaaatactaatattaaagtgcctgttaaatttaacaataatttaaaagtattaagcaaatataattacgagaagtttttcctagctttatgtatcgataaggaagatccaataaataataatctcaaagatttactcttaaaaatatcagatacgagagaaatgattgattcaccgtttattcgtggaaatgttattggtgaaatggatgataatcatataattgattggaaaaacagtgtactacatacttcaataggagtttcaaatgtattgaataatgatgatttacgttttggaccttttgaattgttcttcctaaacaaagtgcttttaggagatgaaaatatgattgatttaaatgaagtatttgaaggttctcttattttgactattaatagctagcaaactgtgtataatgcaatttatctttgtgtattattcatgtagtggacgatcgacctgtcggtcttcccaaataggcaattttctgtgtttcaatgtttttcatttgatctgtgtttatctttttcctaaataggtattttaattgaattgctttaattaaatttgttttacagtgacaatcagcatggtatcttagataaatcatctcagaaaaaggtttcagtaattttgtttcttgtcctagaatcctattgattggtttttgataatattttcttttattttgggcttgtacatttcttaccttacctttgcttttttgagtatcaatttattttataatagattttatttgagtctaagaacaaatcacacactcattttaaataccaaactgaacttagaagcataattttatcaaaattaaagcaaaaacaatcaattgtggcattcaattactaattttaaaaagctacaaacacatatttacaaatcttgtataattaaacactcaaaccaatctaaaagtaatcataaatacctatacaaaaaaactaaaaagctttcactacagaaatgaatttcgaatggagggaggattcactcaatcctttcttaaccccacctaataaaggtttatcaaattatcaatttggcaaacaaaatccattaaaagcagatggtgattttgaaacaataaattctcaatcatctatattcaaaccaatcccattacctgatgatatattaggttttgatccaataccatcagattctcgtttccaatttgaaaatccattgacaatgcaaattccatcaaattcacaaactaattttagtgaatttttagcaaatcaagaaccaatgtcaattccactgaatggacaaaataatcaatacccatatcaaaatactaataataataatagttttaatattgataattacctcaagggtagtaatactgattacaatgataatgatttcttaggatctgagatgaatttaaatttgaactataacggaaacattaatggtaaagaaaatgatattgagaaagttatgttggatttaggtatatccgaagcacccgtacaaagtcaaacaactcaacctaagaaaacacatagacgacaattaagtggttctgaaatttttgggattgttggatcagcagataatttacaattgtcaatccctggtttagtaactcaatttttaggtaagaaaccactttataaagacattaaaagctacgacaatttggaaattttcaacaatgcaaacattgatgatataagtgtacctccaattgatatgggtcttgatgtaattgacattgcaatgggattaaataataattacaatttggatataaattcaggtatgaatatagaaacaaattacaatatgaacatgaatgtgaatctaaattcaaattcaaatatcaatataaataatagagtgaataacaataacccatcgacaccaattaaagcaccaactccgttatcaagaaaagaaaaacttgattattacgtatcttctggaaatccaaattcatataaattcccatcaccgcctaaaggatcatttacaaacaaacctataacacagcaaaatatatctaaaatacccacagaatcttcaaattcactagcaaaagttaaatcatccaactccaatattttggataatttcttaactgatgaatcatcaccatctaaaacaaatttaccaactccggtacctacatccccattaaattcagttgcaatgtcttcacctctcaaaaacaactttcaaacccctaaacaaggatctccaagaaaaatctttgtacatacacagttcacatcaggtaaaaaagttgcggatgaaacaattgtacttgatgatgatgataaagatcgtacaatatctgaaatggcaactcccttaaatggtaaagtaaacattttaaatatgcaaacacctacaaagaaaaagaaacttttaacaaggttacaaaattgtgaagatgcatcattattaggatctccaatgaaaaaaaatatatttacacataaatcaatcaaaggaccaaataaaacggcaataagaaagaaaccaactattacatcaacattagcaagtggttcattagaacaatattttattggtccaactcgtgaaggtaaatatatttgtaaattttttgataaggaaattcaaggtgtttgtaatagagaatttcatagaatttcaaatacaagagcacatattcaaactcatttatctgatagaccttttgtttgtgatgaatgtggtaaagcattcgtacgaaatcatgatttgaaaagacataaaatgggtcataaagctgctggaaatgtttgtccttgtggtaaaggatttccaagagctgatgctttgaaaagacatagggcaagaaatatttgtgttggtggatttaataataaaggtgcagttagtaaaccggaggctacggaaggtaaagctgttaataacaaattatcagataaaataattgcatctatcaataataatccaaattcaattcaagttaaagatatcaataagcaagaagataataaaccaaaacaaccaaaacagcctcaaaccgatcatcaacataattgtcaaaatcaatcgtgcaatcatcaacatcataatcataattataatgattcaaaagactcttatgactacaaaaattatcaacctagtcaaggaacctctaaacctatcagtcaaccaaaatcaaattgtcctgatgaattggaattatttgaatttgatgaaataccaggagttgataataatttttcctttaatatggaggatagtatagtgatatgaagttacaagttttgttaagtttcgaattaccataaaactcatatcaccatacccaactcccttattactgttgctttttataatttttttttagttttatttacagtcttaaaaaaatatacacaattcttaagtaaaataacagtctataacaaaaataaataacaaaatgaatgaataagtaaataaataaataaaatgtctaatatggaataccattggtaattctttggaattcatcataacctttagttgcaacactttcaaatgatttcttaattaatcctctaacataaactgatgcttctttatctgatttatgaggtgcaaatctttgagttaaatgtttaatggttgcagctttaaaacatggtaatccactctctaacatcggaataaccataccgattaatgaatccatatgtaatctgcatgcaaggaagcatttaacacataattcttcaaaccatttataagcttgtgtattaacattaccacccataactctaaccatttctctagttagtttaaatggcgattgttcaaatttaacaccacctggaacaatatcaaaacaaaatccaaaatcaatatgtaaaatataaccatcctgatcatacataatattaccattatgtctatccttgattgctaataaataagtaataattgaataagctgcaagtgatttaacaaaattaattctagcacgttgaaattcaggtgatgtctcagatccaaattgtgaaataaaatattcatataatccattaactgcttctctacctaacatatctcttgaaatagatcttggtaaaacatcaataataccacaacctggtgcagttgctgtaactctatatgggaaaacataaacatcaacacctgctgtcatccaaatagttctaaacattgaaattaattgtaatgctaaaacatcttgtctacaatcatcaccaactttaaaaatagcactagttttaacaatttcataagcttcatctttatcattatcatctttatcattatcatcagtacttttttctacactttcaattttctttgcatcttcaattgaatatgcttctttcttcttcttaatataaaatgtggccataaatggtgcctttgcatgagattgtaatggtttacctgattttctatcaatatcaataacagttccatcaggattacttggtaaataaacaccttcttcaactttaatcttagccatttcttcatcaattttggccttcttttcaggtttggattttttaataaatggttttaatttacctgaaatacctgtaacatcaccaaagaatgaaaattctttctcaaaatatgctctatcataatctgaaaatcctttaatcatagtttctctaatttcatctaatgcaggtttaattgaatcaggtattgttgaatcttcatccttaaatgaatttgctgacatattccaaataatttgatgtgcaaataattgtgaaacattagcagtttctaaaataaatctacgaatataacctaaatcatcatgtctaatagtttgaacaatttgtggaacataaaaaaatgttaaatgaacatcaaaactttcaattgaacgcattgaatattgtaaaattaatgaatttctattatatggtggtaaaaatttattaattgcatcaactggtgaagctgatgcccatgcaacaattgcaacaacatcactatcactaatatatttgaaagctgatggatatttagcaacttcaaatggatttttgataattaaagattttaaagttttaatcattgataatgggatattattcattttttcaaatcttgaaattaaattgactgcataaattccatcaattaaataagcatctctaagtatcttatcatcaagtttatgattactataaattttagaggatgcaccaactccagataatggatgaatccaagaacttaaaatattaatttcatcatcaataaataataagagtataattttccttttttcaaaattagcatccttaaattgaatttgactaaaataatttgcaacaatacttaaaacttctaaatctgctttaattttcagtttattattaccaaatggtgttgtgacatcttttttaaaccatgataatgcaccatctaataaaattttaataattttatctttcattgagctatttaaaaaaatatgatgttttagaatttcacaaccaaaattaattaattcaaatctaattagacgtgcaaaagggtgtaaacttgcagattttaaactttcaattgcaattaaaattgaatttgtaaacatatttaaaatatttgaactttgatgtaatgttgcttggaaatgtgatgataaaaatctgattaataataaatgtgacttaaatgatgaagatacaactttagctttactactaacaattgccttattacttggtaaatattccatcggattaaattcaggatctaacaaatcattttctcttgaatataaacctttaccttcaaatgcagttttttcaaaattttctaaaatatatgataaaagtaatgaagaatattctttctttgaattcattatattcaaccaataaccaattgaatgttcaattgtataagaatcaaataatgcaaatggaatattaacaatccatttgacatatttagctgtttggttaggtattgtgataattactctaacaatatcatccattaaatcaacaaatttatgatgtaatgattcattattagattttgaattaattttattaataaaatttaaaattttttcatctaatttaatgaataatttattaatatcacttaaacctgcttcaattatttttgaatctgatttccatgtagtttgtgataagaatcctgcagttgaatttaatttctttgattgaaatccttgtaattgataaaattctctatcatttgataaaattttacttgccatatctaatgcaaatgaaacaccataattaattgttctatgtgatgcatctgctttcataacataagatcttaaaactgatttcatatcaccatcacataatcttaaagtatttgtaacccaacgtgttgcatttgatgtaaatctatctaaagtttcttgtctccaagtataagaatcggataataaaagatcgatatctgttactcttgatttaaattgtgtcattggttcatattcattagtatctgcatcaattatactttgaaacaataatgctaaaatatccagtaatgcaaaagtactaatttcataacataaagctgaaggaatcttagataatataatgtcagcacatttaaaagcagtattttgtaaatcaatattacgatgacagcaaaaaataaaaattgttttcaatctatttgtaactttttccattgaaagatatgaatttttagatgacatatcatgagaaaattgatttgtacaataattagcaattaatgaaacattattatgtagatttgcaattataactgaaggatcagacatatattctaaaattttagaacaatcacctgttttaattcttaacatttcaaccattaaagttgaagataaaaacattaaaccaggtcttgacatttgattatcagaatctaatgaattaccacttttaattgaaacaatatttttcaaaatatctttatgaattctttcagttgtctttgatgtgccacgtcttaaaattgtattcatttcaattgaagtttcagttctattccaagtatattcagatgctaaaggtggagtactatgagcaattcttaataattcaggtaaacattctttatataatgatgaattataagcaaatccatgaacagtcaaattgaaccaagcatcttgaaatctacgaattgtttctttatcagttggaattcttggtttttcattaatatttggtaataaattagataaaggttttaagaaaagtataatttctctagctgattcagtaactagttgatttgatctatgatgttctaaatcatcgatatcaccctttgaaataatttgtaatagtaaacctttaagataaattgaatataattcttcatttttagattttgacatagctcttgaaaatttattccaagtttcaatacttaatttaaaaccttgactatctttaattgaagattctgaaacatcataataatattttaataatgatgaaaagtcttttttattcatattatcaacaaattcagttaaaccatctaataaaattgaatttaattcaattgatgatggtttaattttttgataaagtaatgttgtaactaaagttaaaattgattcatcatcagtcgattttgaaatttcaacaactgagataacaaaattttttgcaattaaatcatttctttcaattgctaatggttcattagctaaacttttatttgaatttaaattatttccatttccatttccattattattattattattattattattgctatcattatcaatcatgttaatcagtgtataaattaatgaaattaaatcatcctttgataaacttttcatacaatgtttaatacaattagcaatttttttaacaaaatcagttggcataacaatattttgaattataattgggaaatgtttaacaatattaaggccagcaatttgattttcctcggaaagaatagcagcagttgcaaatacgttaattaataaatttgaactaatcatttccaaagccgttgttgaaccatcttcaattgaattcataaaatcagataaatatttaataattttatcatttaaaaattggaaatttaaatttgaaattttaacatttaaactataaatttctaatgaataagcattaattaaaaatgaagttttacgacgataaattgatgaattaataattctatctgaagaattagaaatataatcgtcaattttatattgataattaagtatctcattaaaaatttttgaatttttctctaaaattgaataagaaatattttcataattcatcaaacgatcaattaatgattgatccttaactgcatgaatgataaattttaaataattaatttgtaaattttgaagtaaatcaataaaatataatgaagaatattctatatttaaatcattaaagttataaatcaattcaatatcattttcattttcaattttagttaagatatgttcaattgaattgaagaaattgttattacaaacagatactattaagttaaatatatcttcattgataatagatggagtatcagtaagtgcattaatgaatccaattaatgaaaattgatgatataaattattggataatttcaaatttgagatataatcattaaaagtaatgtaaagtaattgattaaattttgggaaattaatagttaaatgaattaatgctttagtaatttgataagttaatttagtccaaggggttatatcattctctaatttaaacaaagttaatgatttaaaagatttatttgatgaaaatataagatatttagataataatgggaataataaatcaacgtaaatttcagatttaaaatgaattgcattatcacaaactgcgaaaagaacgtttaattcagaattagttattgattcatcagttgaagattttaatttagataggattaatttaaaagaatctgagataatcaatgtatcattattattattattatcaatatttacatgttgttgttgtttagaagatttagcacataataaagccaatttattccaagcttgggaccttgtattgaaattgggtaaactgtgagatgttagtatatcgattttaagagttgcttacctataatacataccccagaaagtccatactggatgaattgtagaaataaagcaagtgaaggctctgtataagttcttctcgtggtggcgatatattaaattgaaatcttatagttgccccttttttccctttatttaagaaattatgattattacgtaagataatttataaagaaaagagctatttatacagttataagatataggatactacactattatgaataagtttcaataagagtatctcttaagttagaaccaatagcatcaggttgattatcttgtaatctaaagatactttctataacagataattctggagctgttgtatctaaacctgcaactgcaagccaatcattaacaaccatacctgcaccaacaacatttgaacctctattaacagtacctgcaacaatgggtacttgtaaaagtgatgataattcttcttgatcttgtattgaagtttgtggatgaactaaaccaccttgatttgataatgaacaatatgaaccaacaaggacattacctgcaattgtttgtttgaaaacttctacacctaaaacatctgcaataatttcttcagtttctctttcaatatctggatgtactaatgcaacataatcattacaacatataacattacctaatgctgataatctttcttcaattctttgaattttaacagtatcaggaattgaatttcttaaatgtaataattcttgatctgttgtttgagttggaactaataaacctcttctattacctgcagtcatacgaccaacaattctagtacctgcaatagttgtatgaataattggtataacatcacctaattctgcttcaaatgctgaataaaaattttcagaacctccaactgcaactaatgaatatgaattagttaatttggaaaaaacaccaacttcattactattttcaaattgtgctctagcagccatctttatactaatatatactgtgtatgatcttatgaaagaagaaaagtattataaataactaaaatatacaatttccaaccattgaaagtgaaaaaagcaaaaaaaaaattttctctctctctctctcttactaataataatattaatagtaatagtactataaaataaccactcgcgaaagaccgtaatataaataatataggaggcgtttatctcttctttgcaacttaatatctatacactggctcatcttaaactaacaataaccaatgaatagacaacgttcaaagcaatcacaatttaaaatagtactcttgggagaatccgctgttgggaaatcttcagtggtacagagatttgtgaaaaattcatttgatgaatacagagaatcaactattggtgccgcattcttaactcaatcaattcatttatcgaaaaatgatatattaagtagtggcgataacaatattaacacagacaatatcgatgatgatggtatcacagttaaatttgaaatttgggataccgcaggtcaagaaaggtatagatcattagcttcaatgtattatagaaatgctaatgctgctataattgtttatgatataactcaattagagagtttagataaagctaaatattggattaaagaattacagagacaagcaaataaggatacaattataatacttacaggtaataaattagatttaaatgatgaaaggaaaatttcaattgatgatgtaaatgaatttacaaatatttataatttacttaattttgaagttagtgctaaaactggtgaaaatgttaatcaattatttaaagatattgcaattaaattagttatcaagaatttgaaatcaaataataatttaaatactacaaataaacattcaaatactatcaatttaaatcaaaatatcaataatactacaaatgatcaaaattgtgcttgttaactaaattatattatactatattatattatactatctaaatctattaataattaattgatcaggtccaacttcctcatattctgccttagaaacccataattgatgaaatgtacctaatgatgataaaattgatccaccaatccatgatgcatatttcctttcaattgaattaccagctgaatgaactctaatttttaaacttggattatttaaaactaattcattatttaacctctcatttaatcttggtattaatgtacttgatcctgttaatactatattattagctaattgaggttttaaatcaatatctaaattatctaatacattttgaattaactttgttaatccaacaggtttatcagtagtagtagaattaccattactatcatcctttggtattatatcaccttgtgtgttatcattattattattattattattattattattattattattattattattattattattattattattattattattattattatcaccaccttcttcttcttcttcatcttcattctttttacctgttgatcttcttaatggtatataatctttattagttatttcatttttttgtatttcgaaaatttcacttattttaccagtaaatggattctcataattttcaataacttcccttgttaataaatcatctggattaaataatgaatttgataatttttgtctctcaaattgtgtaaatggaatattttgaccatttggtaattcaaaccatctagtttcttcactttcaacttcatttgtaatattattcttttcaatttcatcatccattgtacattctaataataattctttcatttctcttaatgttctcaaatatgaaaaatcaataactgattgatcaattggattatcaaattttttcaatgtaaaaattgcttgatcatgatcaccccaataagttttacttttattacttatttgaaattgtggtatataagttagtgatttttcatttaagaatgattttaattgcatattgagaaaattaccagcatattttgttgctctaacttgatttcttaaacataaaccatcaataattggtgtaacagttgttaaatcatgtccaatatcaacaattaaacaattaggtctaccatgtgcaaaacttacacatgttggttgtttaacagtatacattgcacaataattttcagtttcgaaaaaatattccattgattttaatttattattataattattaaatgatgattcagttaataataatggttgagttgatggatcaatttctaatttttctttaaaatattcatattgctttgtaaaaatttcccaatcattgataatattattagaaataattgaattgattgttaaatttgatttactatttgaaaacattacattttcatcgaaaattaattcatcattacttttaccataatatgatggtaaaataagtgatggttgatcattacctgcataacctacttgtgttgtataagatcctggatctaacactatagcatctatttcatctgctccatatatctgtggtgctgctgtcttctccatgtctattggtctattcgaaaagaaacacacactgttgtgccaatatgtcttgaattcagcgatatactaaatttgaaaaatctctaattacgttaattttataattaatatattggaattgaattcttgagatttataaaaataataataataatagtatataagctacatgtatgaatgaataaatatattatatatacaacatctaagcggagacattaacttcagttgataaaatatctaaaaggaattgaatttctaatttacgtctagcatctacaatccaatcatttgcaatttctcttggaacaccctttaatgatgtaacttcttcaactgcatcatctaatttatttttttgtaaataatcattaacccttgcaataactgattcaacatcgttaccaataaattcatcttttgttttaattggtacacctgattttgaccataataattttgatgccaatgatgatgaaatataacctaaaatacctggattttcaggtaataaagaaactgatcttaattgtggtattaataattcccatcttgataaaatttgtgattgtgttaaaacacctccattaagtaataattcattagttgatgggaatgattcaattgttgtattaattaatttattatctaatggttcagataatttctttaagttagaaatttcctttactaatgattcacctctaatatcacttggagagtttgatacaattaatgaattaattttagataaacaaattctaatttctttaaaagttgtataggataatgcaacttttgataaatcattttccatttgttcaattgttttaattctatcatttaatgcctttaaattagataatttaccatttctttcagtttcaattttttcattgattgaatcattaaaagttttcaataattctaattctttttgttttaatttattttcatattctaaatgaattgtttgttcaattgaatttttttcattttcaattattgccttatgtttagattctaaagatttcttagttgcttcaacagtttcagttaattccttaataacagcagttttctcagattcaaaactttcctttaaaatttgcattttttcttcagctaatttatcaattgcattattatcaatagaagttcctttctttacttctttaacagcaattggcttaaaagatttaattgcatcctctaattgagtgatttgagatgaggaaacttcacttgattcattaatatcagagataagtttattaattgccttaacaagtggctcagcatccttacttgaagctttaagtaaaggaatttgagctttcttaatatttttatcaacaatttcagttgttggaacagctggaattggatcagaattagatagtacaatataattattatcatcctttgaagctgttgatgcctttacaggaattttctttttaattgattcatcatcaacttccattccaactaattctttaactttattaatattagattcaatttgttcaacttgttcattataataacctttataatcaaaggatgcaatatcatgagcaatttgagctctatgagtccaaacataatcagttttatctaatgcccattcaccacctggaacatattcttggaaaggttcctgtaatggttcataaataagcgcagtggcagaggcagtggcataaacggcagcggtagcagcagagaccttagtgaggaccccaacagtcttaaaagtagatctaatcatcgttgtctgtctgttaattcaacctataataataatataatacacctacatagtaaaacctctctctactgtaatatgtccaatttctcaaaaagctcattcattcattttttgaagcactgggaaaattgccattttaatttccaattggtgaaaatttattcttttcattaagatatatcatataagaacagtatactaactagacatagagacaatatgcaagctcctgttgtgttcctcaatactgctactcaaagatcatctggaagagaggctcaagttgccaatattgcagctgctaaagctgttgctgatgttgttagatcgtgtttaggtccaaaagcaatgttgaaaatgttattagatccaatgggtggtattgttttaactaatgatggtcatgcaattttaagagagattgatgttgctcatcctgccgcaaagtcaatgattgaattaagtagaactcaagatgaagaagttggtgatggtacaacttctgttattatacttgcaggtgaaattttagctcaatcttatccttatattgaaaaaaatattcatccagttattattattcaagctttaaagcaagctttggaggatgctttagatattttacattctatctcaattccagttgatttaaataatgataatcaattgaaaactcttatatctgcttcaatttcaactaaatatatttcaaaatggtctgataaaatgtgtgatttatcattaaaatctgttagaagtgttttagttcaagaagagggatcaccaatggaaatcgatttaaagagatatgttaaaattgaaaaaattccaggtggtgaaattgaagattcaactgtacttgatggtattttacttaataaagatgttgtacatccaaaaatgagaagaaatattgaaaatccaagaattattttacttgattgtccattagaatataaaaagggtgaatctcaaacaaatgttgaaattacaaatgattcagattggaatagattattacaaattgaagaagaacaagttaaattaatgtgtgatgaaattttaaaatttaaacctgatttagttattactgaaaagggtgtatcagatttagctcaacattatcttttaaaaggtggttgttcagctttaagaagagttaaaaaatcagataataatagaattgcaagagcaacgggtgcaactattgttaatagagttgaagatttaaaggaaactgatgtaggagaaaaatgtggtttatttgatattaaattaattggtgatgaatattttacatatttaattaaatgtcaagatccaaaggcttgtacaattttattaagaggtccatcaaaggatattttaaatgaaattgaaagaaatttacatgatgcattagcggttactagaaatattttcttagaaccttctctttcacctggtgcaggtgcaactgaaatggcaatatctgttggattagctgaaagatcaaaaaaaattcaaggtgtacaacaatggccatatcaagcagtaagtgatgcatttgaagtaattccaagaactttagttcaaaattgtggtgcaaatccaattagagttctatcacaattaagagcaaaacatgcaatgggtaatcatacttgggggattgatggtgataatggtaaattagttgatatgaatacttatggaatttgggaacctgaagttgttaaacaacaaacagtgaaaactgctattgaaagtgcttgtatgttacttcgtgttgatgatatcgtcagtggggtccgtcaaagtgcttagtttatgtactctatctctatattatgtatatataacatctataatataataaataacatctctttatactacataaaatactatattagtaatttttcatgtgtcgtgataatttattatggaatgtattttgtctctttttctgaaactttattttatcctgaacagtgaaacaatgatgattagacaggatcatactccagttttatccagtcgttctcgtagttttagtgaatctcaatctcaagctcaacgttcttcaagagcggaaaagagaatgggtagattgtttcgtcaaaatacaacaactgcaaattcatcaaataatttaaagaataatcaaattgatgaacaaccattgactatattgtcattatctaaacaatatgttatggtttatcaacagatgaaagttacaatacaatcattaaatttaaatcaaactttacaaactaataatattgattcatttattgaagtaattgaaaatacagagaaacatttatcaacaaaattaaatgatgatatgccaattgattataaaaaaattaaaacttatttatcaacatcattatcttcatccatacaggaattgaaaaaggtaattaatatattgaaaacttccataaaatcacaacaacaacatatcccaatattcatattaagatcaactttttataatttattctcgatgtttattgaactttctaacatagcacaaacattaactcatatatctgaatcatcaactctatcaaactcatcatcaatatctactaataataatatcaacaacattctaaattctcaatctgctaataaatcacctgcttcagattcttcaacaacttttattcctgaacctaaattagatagacaacattcagatttagcatcagataatgatacctctggtgataataccaataataataataataataataataataataataataataatagtactacagactcattgttcaatcttatactgcaaactattcaagctgcacaaactgtttatacacaaattgatgatgcaatttctaaaaattcaattaatgaaaatgaatcacttgatccattccttgatattgaaaatacaatttctaaaattaaagaattaaaatatcaatgtgttgcatcaatggaacaaacaaaacgtgtacgatcattacttaaattatatgaaaaaaattcaaatacatcaaatgattttgaattaaataaaaatatttatgaacaaacaaatattttccttaaatcaattattaatattttagctgcaactaaagctgcaattactaatgtaccaacattaaatgatgttagatcatcattatcaattttaactcgtgcaagtaaggaattaacaattaaattagaatcaagttcattgaaaaagtttgttattaataatacaccttcaaatacaacattaattgaacaaccaaatttatcttcaataccttcattaccttcaataccttcaattcatgatactcaacaagatgatcaacccgtattaatgaaaaaacattcaattttaaagaaaattcctgaacaagatgaatcttcactgggactgttaaaacaacatattaaaaatcttgaaataaatacaaatttcaataataatatgaataataataatgaaccagataatgatgcgatggtaatgcatactccattagctgttacaactccattgattgcatctattggacctgcagttgcaagtgcagttttaccaattaaatcaccattaaagatggcaagtaataataatggtacatttaatattaatgatgcttttgaacaaaataataatagtatggaatcagaatataatccatttgagaatttaattccaaaagatcaatagtattgtttctgaataatatgtatatattctatttaattaattattaagtttataaaaaaattaaaaaaatcaaaaaaaacctgtgatattatatttgcacgtgaaaagtataccttcccctacttcattcatcatcattaagtcttgaatatgctgattgtctattgaaaattctccaaaatctagttaaaaatcctttcttagttttattattaataataaatgaatctaaattaaattcattaatttcatttcttaaatctgcattaccatcattccaaccaagattaacttcatcaaaattaaattcaagtaatttttcattatttttcttcagatcatcaatattccatcttttcaatcttaatgaattaacaacaactgatgttgatgaacatgccattgcggcacttgcaaacataggatttaatgttctattaaatggtataattaaaatacccattgcaattggtaacataattaaattatagattattgctaacatgaaatttaatctaattgtatggaatgttgatcttgaaatatctaatgctgcaaaactacctaataatccaatatgtgaatcattatttgactccattgttgatgataataaaacaatatcagcagcactcattgcaatatcagtacctgatgaaatagccataccaatatcggattgaactaatgctggtgcatcattaataccatcaccaataaatgcaactttaagccctttattctgtaatccttttatatattctaatttcatttcaggacttgattctgctaatacattatttagcggaatacctaataaacctgcgacatattttgaagtttgaattgaatcacctgtaaccataccaactgaataacctgattgaataaatgtttcaatagttttctttgaatcatcctttaatgtatcagataattctattaatccaataaatctattattaattaaaatataacaaattgaactaattttcaaagattttgtattttcattgattgattcatctaattcattcatattgataacttcaaatgattttaaaaatttagagttacccagttttacatcaagtttttcgttggtttctaaattaatacaatttgttgaaatacctaaacctgcatgagtattaacatatgagaattcaaatggtattatttcattattacctaattcattcaaagatcctttaactaatgctttagatattggatgttcactatttgattcaattgcatgaactaatgaccaaatcattctattatcgtttttacttaaaaacttataatttgttaattccattacaccttttgttaaagtaccagttttatcaaaaatgatagtatcaattttattagcattctctaaaatttctccacctttaattaaaataccgttagttgcaccaacacctgtaccaaccataacaccagttggagctgctaatcctaaagcacagggacaagcaacaacaataactgaaattgcaatttgtaatattttaaaatattgaatttcaagtgttgaattttcttcattttccttaaggaaaaattttggtatatgatcaattggagaacaataaacgtacatagtccaaaaaatcaatgtaattaaagataaagttaaaatcagaataacaaaaactgaagcaattgaatctgaaattctttgaattggggcagtagaaatttgtgcatctttaactaatttaacaatttgttgtaattgagttttttcacctaaagttgtaactttcatataaatagtagatgtaatattaactgaaccagcaattaatggagatccaacatcttttataactggtaatgattcacctgttaataaagattcatcagtttcagatgatccaaaaatacataccccatcagctggaattttagaacctggtaaaataattgcaatatcacctttttgtaataaatcaatagaaatttctctttgttgaattgttgaactatctaatgaataaattgaatttttttcattatcaaaaatatttgaatcttcaactataatacatgatgatggtgttaatgataaaagtttagataaagcagatgatgtattaccctttgcgttactttcaacccatttacctatcccaacaaacaggaataacattgtagaagtatcaaaaagaacatttggataagtatctgctattaaaccatggaaaacacttatgagggaataaaaataaataattgtagttgaaaaacaaattaaaacatccatactaccagctttatgttttaatgatttataagtattgatataatatttctttcccagtgaaaattgaatatatgtacttaatatcagttgtatcattatatcaatataaattcctctgtaaattttaaatgaatttaaattccacttgaagtatttacgtagaattggtaagatatgtgcaataaacataagtgggaaaccaaatttcagtaaactgaaaacattatttttccaatatcttatttctttaatcttagataataaatcaacttgtgaagaagtatctaatttattgactaatatagcatcataatttaattcattaattttctctattattattcttacaccgataatatttgaatcgtattttatatgtactatctctgatgcaattgaaactgtacaacttattatcccaggcaacggtattattacattttctatacttattgaccaagttggtgctaatgaaccatgaattttcaagtcaatatcattaatatcagtggtggtgttggctgtggatactaccgctgatgtaacttcatctactttgataagacttgcatcaaatcctacatcatccacagtttccaatatttcctctacagttatttgcttattgaacaatactgttgccctttcagttaataatgatacattaacttcctctacaccattaagttcctttaatgcattagtaattgaattaacacaagcggaacatgtcataccgcctattgtaatttcagctttatagctaatatcattaattttatcattatcacgtaattctaatgacgatattaaattaccatcaaatccaagatcatcaatggtatttagtatatcatcagttgagatactattattatgaattattgtagcttcctcggttatgagtgatacgtcaacactagaaacaccttcaagtttcaaaagttcattagtaattgaattagtacatgaagaacatgtcataccacttatttggaaaattgtcttaaatttagataaattatttgataatttctcaaatttttcatttgttaaattagaattataacttgaatcatcagttgaagaaatcagtgatccatcaaatcctaaatcatcaattttttcaagtaaatagtcagaagttatttgaggattatgcttaataattgcttcctcggtcagtaatgaaacagaaactgagtctacatcatccagtttattaatacaatttgtgatagaatttgtacatgatgaacatgtcattccagatacttgaatggtggtagttattgtcattgccctgttgaaagcagttcaaaagatggaattgttgaaaagaaataaaggtacatcagcatgctctttatattgaaaaataccgaaaattttattttctcactttctgttaggttggcgatatctccggactttaacggagtaacagttctttatctattatctatattctctatattagatctatatacactttatataacggttatctatctatctcttaacactggtatgtagcttattctccttaataatacacacagaaagtaaacctagtatggatgcaccaaatgcaaatataaaagtataccaaacacttatattataagattcaatcattaaattaactgcccatttaggtgcattatttgatctaatatattttgcatcatgcattgcattatcaatgatcttattcaaaactttttcagaaacatcatcaggtttatttgatgttaatttattaattaaataatatgataaattattagtgaaaatatatgatgaaaatgaagtacctaaagttgaacccatacttctaaaagcatattgaattgaagtaactgatgtttgatgttcaattggaactgctgcaattaatgcaagtaatgtaactgttaacattgatgcatatgcatttatagataatacatttaatgtaaattgttcaaaaattgaaggataagtaccaggtcttgttctaattatcatcaatatcaaacctaaacaaccaattgaattaattataattgaaaatttaagatatttaccactccatttcatataataaccacttaaaattgatgataatgatgcaactataatattaggaattaatctaataccaacaccatctgatttaatacctaaaacagttgaaagataaactgggaaataatacattataatatatgaatacattgtaccaaaccaatttgctaatgaagcacctaaaactgatctatttttcattaattcaacaggtataattgcaaatggatgtgaattttcaactttatataatgaataaataccaatcaataaatgtaatgacaaaataaaataaacaaatttatcttcaaaatttgcacttgccataataataagtataagtaaattaaatgcaataaggaaaatacctttaatatcgactttctttaatttttcactcattgtagtaccactattagcattttcaatttcatgtggtaatggaggtaaattaaatgaaaatacaatcattaaaaagcaaattataccaattggaacttgacaccaaaaagccattctccacccccaatgttgtgaaatccaaccaccacaagtaccaccaactgctgaacctaaagcaaaaaaaatattacctaaaccttgataaacacctctatctcttaatggaattaaatcacttgaaataatagtacttaaagtaaacaaaccagctgcaaacccacttaaaaatctaccacaagtgaaagaaataacattttgggctaatgcacattgtaaacaaccaaaagtgaaaactgcaatacaaattaataataatggtttcctaccaaaaatatcacttaatttacccaatggttgaataattgaagttgagaaaagataagcagttgcaatccaagaaacgtaaggtattgcattaagatcagatgcaatatctgtcattaatgttgataaaattgttgaatctaatgaagctaagaaaactaataaataaacaggtattaaaattgctactgtttgattatatggcaataagtaaccatcattctcagtgttatcattatcaatttcattatcattattttcgactgttccataatcttcaataatttcttcagctatgtaaccaggtaatgaagttgaggtatcatccataacatcagccagatggctcttagtaggcaccaaaggttgagtggacatcttgttgttagaaattgaaagaagagaaaagaaatattgtaagaaactgtggaactttaaaactttatatagtccctgaaattttatgattgtcgggattacccaattaggaaatgatagttacgtaatatgttacattctatcgatatctatctaaggcattatacactgctctcaggaactggagttgaaataacactgtttgaaacacttattgaattagagttagaattagcattagcattagcgttagcgttgagtaaatgtaatcgtctctcttccttacgtttacgtttcttttcagcttcctttgcctttctattactttcttcatctaaatgcattgcaatggtaaagtcatcactccaatggttgtctattttaattgagtatttaaaaatattttcataccatttgtttaatttagcagttgttgcggtttgaaattctggtttgtttaagataatgtaaataatattaattaatcctgtacttttcaagattgaaattgataaatcagctgttattaatggtgtaattaattcatcaattgatttattaagttttttataattaactggaggttcttctactaattcttctttagtttcttctttaacttcctccttaacttcctccttaacttcttcctttacttcttctttaacttcctccttaacttcttcctttacttcttctttaacttctccttttgattgttttcttaaaggaaatataagtgattgtaattccattcttaaatcataacaccaattagtcatttcctcaacttcagcacttaaggcagaagaaataggaattgtattaaaatcaaatttgaaatcctcaggttgtcttaatttaagttcatcaactactggttcttcctcgacatcttcttcctcttcctcatcttcctcttcttcttcctcttctttttctatttcaggactttcctctgatccttcatactcatcatcatcatcatcatcatcctcaaaaacctccatctcttcctcatcttcttcctcttcctcaactttcttaggctttctacctggtctaccacgtttcttctccttttcaacaacttctttctttggtctaccaggtttcctaccctttactttcttctgtttcttaacaacaccatattctacatcatcatcatcatcaagagatcttttatcggattcaatttcttcttcaggttctggtgttataggtttaccccaactaccccattgtaaaaattcatcaattggtacttcaagtacttttaaataagcttcagttattctcttttttctaccaccacgtttagtctcatgaacaacttctccaccttcagtactttcaataccatcaacattttcaccaacactaattaaataatctttaacaacttgttcagttaatggtttaatattcccctttttagtaaatgaatattgatcatcataataaaatttaacacaaatttgatcaccttgaggataattttctaaaaattttttattctttgaacttgattttaaattatttggtatatcatccaaaggtacaataattgatggccagtctgggaatccctttatttttgataatactaattgttttggtgttaaagttgtcatttgttttaataaaagaatacactgtgtttaaattggacaatattaagaaatttggataatgttttttgtacaattgcgcgtagtgttgtattatgacattgctgttgttgcctttatgacaatatagtgtaattaatgttgtatatgtctgtatgcagtggtgatatgatattttaagtgtgtagatagttcaattaggtgtatcaaagtattttgggaaaatatgaagcttatatggtaagaattgagtaagataaagagaaaagtactgaattgacgagccacctaaaaagataaaattaacaaaataaaagaataactaaaatgatttataattgctacaaagacaaagagctataaaatacttacaaacatagaattaattatttttcatggaatttaagccaataaacttgatcaatcaaagtctttttgacagcatatttagttaatggatcattcatatcaccgctaacagcataaccatgagttgtatttgaatataaatctaattgataatgaattttatttttctttaaaatttcctctgatttatatctcaattcttttgtgaatatatcttcagtttcagcacaagaaataagtaaaggtttattaattgccattaattcatcatcagagacaaatgaaggatgagcgaatgcaccaacatcaatcaaaggatttgtagaggtgagataatgtgaaaggtattttgcaccaaaacaataaccaatacctgataaaaattcagtatttggatgatcaattttaaattgattaaagaaatctgcacaaattttagttgttaattcaggtggatgatttgttaaccaagcattaaaatcatcaccagggacataaatatcattgttaagtatatccataataatgacaggataatccaatttatctgcaaaggtatcagcaattagtttaatgttgactaactctaaaccaaacacattagtgaatatgaaaaggaatttctttgaatcaggagtataatttgaagttacataacaagttaagtttgaaattgttttaattaaaccagttggagtaccagtgtgaataactttcttaccacagcaatgttgttgaggaggatttgatgacattctatgataaagaatagagtatgctaatagcagttatatttataaagtttgatctcggatttatttgatttttcataatttccaggctgcgcaatatatctgggggttgatctttaatggttaaaataatgagtcagtatttatccatatcaaaggtaattgtattataatgtatgagaataagtttttcaattgaaataaaagagattaaaataagagatggaaataattataatttatttatgataagaaacaaaaatttatattatttaaaggtattataaaaatttataagcaaacaatgttcaattgatcactttggcattggttttgaattgaataatttacatcttaatttcatacaatcgactttttgaacctattattaatttttaatttaagtaagaaatgaaaaaagctaaataattcagattaatagttcttgatattacgtaaaccctttttgtttacaattaaattctgcttttgtgattcactctataacgtacttccatcccgttttttacaccgctaagaaaatggtccgaatccgaatttaatttttttccgttttctgaaaatctgcattcgcaactaacaaatttttacttttgcatacaatgtgatttccaagttgctttttgtactttctgcaaagtgtgattcactactaaattaattgaaatgtaaacaacataataaaagtcttatcaagattttagttacgtatttacgtaagctataacatatcaatataactaattaagttattattgatatatcaagtactacactctcttcccatagagaaactcttatcagattcattaaaaaggcataaaatattcatgaaatataaaagaactataagaaaactaataaaagatttaattatttttcatgaaatttaaaccaataaacttgatcaattaaagctttttcgacagcatatttaactaatggatcatttaaatcacctctaacagcgaaaccatgatttgtatttgaatataaatctaattgataatgaattttatttttctttaaaatttcctctgatttaaatcttaaatcctttgagaaaatatcatcattttcagcacatgaaataattaaaggtttattaattgcttctaattcttcatctgagacaaatgaaggatgagcgaaagcaccaacatcaattaaaggatttgaagatgtaagataatgtgaaaggtattttgcaccaaaacaataaccaataccagaaaggaaagttgtatttggatgatcaattttaaattgattaaagaaatctgcacaaattttagttgttaattcaggtggatgatttgctaaccaagcattaaaatcagtacctggaatataaacatctttattattaagtatatccataataataacaggataatctaattttgatgcaaaagtatcagcaactaattgagtattaacaagttctataccataaatatcactaaatataaagaggaatttctttgaatcagaagtataatttgaagttacataacaagttaagtttgaaattgttttaattgaaccagttggagtaccagtatggattactttattagcacaacaatgttcttgaggaggatttgatgacattgtgttaataaataaataaataattaaaagaagggtgtattactaagaaatgtactttccaataggagataagctaacccgaggaaatagaaatatccgctgtgtttacataataataataataaagaaatacgctgattgtccaataggaaatttcgcgggtattttcaattatatgctgttagtattagtattattaatattaatattataagtaatacagtgtatgctgttttccatttattacttactttcatctctcttctctcttttcatctttttcttctcttgtaccttcttttaacaacacaaataatttattaataacaatgttaccagctggtgttatcgttgtcttctgtttactcttcgttatcggttgtaccgttttcgctcttatgatgattaagaagtttaaacattaaagttaggtttaagttttgttttttagctattatttactctctctatctaattaattaattaatcactcgtttttttatataatataatataatatatttaataatcataatacttaatcataataataatatactgtattgtccaataatattccattataaggacattcgcactttctctaaatttaaaatttcctttttattttccactataatgacttcattaaactattataaactaattaatctctgctttctcccaaataggcattcctccttcctatctgagtattatctatcttctttttattatattataatctcatttgaatatattaataatattaataataataataaacaatcaaaaaagtatgtaatatcttaataccctcctaataccctcttataattacaatactaacatatctctttatagtgtctgaattaataaacaatcaacaacaacaacaacaacaacaacctttaaatgatcaaaataataataataataatattatagaaaataattcaaataatgaaaatactccaatagttaataccaataccaatactaacactaatgaagaagaaatggatgatgatgatgatgaatcaaaatcaaatgttaaaagagaacgtcgtaaaattgaaattaaatttattcaagataaatcaagaagacatattactttctcaaaacgtaaagctggtataatgaaaaaagcttatgaattaagtgtacttactggtactcaagttttattattagttgttagtgaaactggtttagtttatacttttacaactccaaaattacaacctttagttacaaaagctgaaggtaaaaatttaattcaagcttgtcttaatgcaagtgatgaacaatcaaatgatgaagatgaaattcaaaatgatcaacaacaacaatctgctccacccgttgcttctgctgttcctacacaacctacacaacccactcaatcacaagattataataatcaacaaaattatccaaataataattatttaccaaatgatcaacaaaatttctcttacggtgattcaactggttatcaataaataactcttataatctaatctaatttaattactctaatacttcttttttatacattttttaaaaactttttaatcattttttgtaattttaattctccattaacatccataccatcctctctcatttctttatttcttttcaaaatatcattgaaaaattcactattaataccacctttctttaattcttgatttgcccaatatgttgtagtatcttttgtaaattcaggatgtccttgaaatgttaatatcttatcctttatataaataccttgaatattacatttatcacttttaccaaaaaatatattatcatcattatccttaactctatctctatgaatttgactaataataaatgaatcaatacctaacacaggagtttccatttcaactttaacattaccaatttcccatgattcacttctaataatttcataacctaaactacgtgcaattatttgatgtccataacaaatacctaataatttacaatccgttttaataatagattttatataatctattaacccattattaaatttattatcttcaaatgcatcatattttgatcctgtaaaatatacaatatcatatggtattgtaggtaatttaccattatttacataattataaatatcaattttaaaattattattattattatcaatagaatttaataaaatttcacccatttctgcataatttaaattatcacttacaggtactctatcatcatccaattgaataattgcaacatttaatattttactaacagtcatggttatgggaatcagtggaaatcaaatccgatatcaaatatcgactttataatgactattaatcatgaaataattattggaaaatggtatgactcgcataggtgctttttatttataaatacccactctcttatctaatttttacagtttttaaattttacaatttttcagatttataacttttccatttggcaaagatgaatttagatttacaaaaagacacatacactgaacaacaaacaccggatgagaaactagttttcgctccagatacttatcaatatacactttatcaattaaatgaacaagatcttgaaaatgatccaattaaacaatttaataaatggtttcaagaagcaataaacagtggagaagatattccagagagtgttgttttaagtacttgttcattaccaagtggacgtattagttcacgtgttgtattattaaaggaattagatcataagggatttttaattttcagtaattgggatacaagtaagaaagaaaaagattatcaaactaataaatttgcaagtttaacatttttatggaaaaaacttcaaagacaagttagaattgaaggtataattgaaaaattatcatataaagagagtgaagaatattttaatgttagaccaagaggtagtaaaattggtgcttggtcaagtcctcaaagtagtataattaaatcaagagatgaattagataaaattgttgaagagaaagaacaagaatttaaagatttaaaagatgatgaaattaaatgtccaccaaaatggggtggtattagaattaaaccattagaaattgaattttggcaaggtagatcaagtagattacatgatagattaacttatcgtagagatgatattaatgacaataattgggaaatttttagattagctccgtaagttatataaaactatttacttaattaattaaatttattaacaacttttgaaaattcagaaccttgagttttagcaatttttaattctaattcacttggttttcttgaaccatcaggacctgcaattgtacctgccccccatggagaaccaccatgaatttcatttaaattagttaattcaccgaaaactggtgcataacctaatggaacataaatcataccttgatgagcaattgttgacataaaattaacaattgtcatttcattaccaccacctgtaccagttgaaatgaaaacaccacaaggtttttgatataatgaaccattttgccataaaccacctaatgaatcaataaatgccttaatttgagctgggaatgaaccaaatctagttgggaaaccgaaaataacaccatctacagtagttaaaatatctggagttgctaatggataagatggttttgcaggtgcatgcatttttaataaaacttcttcaggtaaagtttctgcaacttgataaattgttgcagtattacctgattcttcaatacctgccttaacagattctgcaagagttgcaatgtgatgatacattgagtagatgataattgcgatattagccattgtttagttgttgtttagttgtttgttgttataagagaagtgataagagaagtgtataataaatgaaaacagaataaaatgtggcaaaagggtcctttatttataataacgtggaagataaacttgcttattaacgtttcttagtaagcgagtgtttcattattaagtattattaactatattatcaatgattatcaatgattattaactggatgtttatatgattaataagtgttattaagtaaatgatgattattaagtattaagtattaagtattaagtattaagtattaagtattaagtattaagtgtattataaatgtttatatctaattatacattctaatttaattgaaaatctttgaaaagaatctcttaattgcattcttcttctttggtgctggttctgcaactgtcttcttagtttctttcttaactggttccgcctttttaacttctgtaactggttcagcctttttaacttcttcctttttattcatttttgaaacaatttcagcaaattgtttaccttgaatattagcaatttttaaatcattttcagttggttgtcttgaaccatcagaacctgcaattgtacctgccccccatggtgttgaaccttgaatatttgataaatctgtaatttcaccgaaaactgctgcataacctaatggtatataaagcataccatgatgagttaaagttgataataaactgaatacagtagtttctctaccaccacctgaaccggtggaaataaatgcacttgcaggtttttgatataatttaccttcaccccataaaccaccagttgaatcaataaatgatttcatttgagctggcattgaaccaaatctagttgggaatccgaaaataataccatctgcttgaactaaagtttcagttgttgcaattggataatctggctttgcaggtgcatataatttagtaagtacttcttctgataaagtttcaggaacttgataaattgttgcattattaccagatgattcaacacctgatttgacagattctgccatttgagcaacatgatgataagttgagtaaataacgattgcaatattagccattgtagttattaaaggaagaatgaacgagaaagaagaagaataaagaatgaaattagaagtaagaaacttaagttatttatctgaaaaggaacaattactaagattataaataaaataagatggctgtgcattagtaaggaaacccttaatcttttcacctctttgtaagcataattctcttattattattaactcttttcactttacagtatttcaaagcaaatttatcaattttgatatttctaacatttatatcattgataaatggttcaatttcttcaattaaccaattacttttcaattggaaaagtttatcaaatctttcatttggagttttcaaattcttcagtgtttcaatattaatgtaattaactgtattggaattagttatatatccaatacctgtaattatatctttaatatcaaattttgtattataattaattggtaaattcatacgtaattcaataagtaaatcatcaattgaaatttttttaattttttccaatatagtagatattataaatttaattattttattatcgtttaatatatattttttgtcttcaatattataattaataaattgatcaatacatggagtttccgtagtaatatcatctgttatatttgtataattaattattaaaaatgtaattattctaataattaaatgatttttaatattatatttttctgaaattttattataaatattaagtatcgtacccttaatatcaattgaattaaaatttaatataatttcattaattaattgaattttcaaattttgtgaaattttaacaattttatcaaatgatggataaacattatcattaattattaaattatcaaattccacaacagaaattggtgtttgattaaatattttaataaatgatatcattacttcattaagagattcaattgtaatacaattaaatttatcatcttttatatcatttaaatcatttatttcccaaatatttatatttgaataatttataatattattatgaaaattttcaataattaaataattttcaaaatttttaaaattaataaaatcatgtaataacatttgacaatttgaatgattttgttgtctaattttaaatgttttattagtagttgttaaaaaaggtgttgaattagatgatgatgattttaattgaaatttatttgaatttataccatattttaataataatttttcatttgttgtagatgaagattttaattcatttataaaagattttggtaattgaattaatttataattagttgatgtattagaaggtagattatttgttggattaagtattgaaaacacgtcagtcatttgtcaaaagaaaagagtatggtctaagtaatggtattacgcgtcagtatttttcagtgatctttaacaaaaaggaaaaactgataacgactaaaactctagcgtacaattttgtaagttatataaggctagtaatataaataaggatgataatttcatatctgaaataaaaccattaaatgaagatgatgaataattataaagaattataaaatgcattaaaatttccaaaagaaacgtaaaatagataattttgaagaataatacatcttaaacttcttttcttgatttttcatataaattatataaattatataatttatttaataatataatataatataatataatataaatctaattttttaaattatttaagcttttcttgattttggtttagttgcattacttgaacttgtagttttagcagttgaaacaacaggatcaatgacttgtttctttgatttctttcccttctttaaataaacagaaatgtagaaagaaatgaataagaataaataagaagtaattataacataaccatagaaagccgcttgttgagtaccataacaatcacctaaatgaggtaaaataccatcaaaataaacatttgcataataagtataagtacaagtataaataaatgcaatatcaattaaaaattgtaaaatttgaaatcttgtaacccattgtttccaccaaactttaataccacaacttgaaaggaaataataaaaatacatgaggacatgaacagctaaattaagtgaaataactacccattcaacagaagtatgaccaataatttgagtataacaaagaagtgcagttgcaccatgatgataagtatgtaagaataataatttttttcttcttaagacaaggaaaactgtatcaaataattcaataaatttagttaaataatttaaataataaagacaaactaatcttttagtgaaagcttcagaagaacaaactgaatgtaataaaccattataataccaaattgggaaaacttgttcaatcattaataataataaaattaaagaaactgaagttaagaataaattatgtaattggaaaataaaatttaatttaattggatttgaatttaatttatttaaaatgaattgaccaccgaaaataatgaaataataagcaattataattgaaattgcatgagggaaattagcaaggaaagttttataaggtataaaagtaaattcatcagctgaataattattattagtgaaataagtgaagaaatgattaaaaattggccataaatgaataccgaaagggtaatcaggagaaggttttgaccaaataatataatcaggtaatgaataagtcattatttaataaaaggaaggaagatagatagaatagaagaattaaaagaataaaagaataaaagtaaacattgtatataaaatgttagtaatggttgttgacatgtgttgaaaaatttaaaatagtggaaattaaataaataaatggttggttaaatgatccagagggtcgatgggactgccggcagaacagtaataattacaccgagtcacgtgacattgccaacagtcacgtgacctattatattattacgtaataaagccgggtgtagaaaacggatataaaatttaaaacggctataaaaattgaaaaatttaaaatttgtaaaaaccactcggctgtagtattataataataataataataataataataataataataactattataatatcagggcagtttaatttaataacctctaattattaacatcccatctattcccgaggctataatcttattaccttatttaatattcttataatcttattttatttaataatcttatatatcaccacattgcaatgatctttaataactaatactttccctatatactaccttctcttcttttaataatctttcctaatgtcaaataatatacccttatcaaatgcagttaatttaaattcttatcctattatacctaatatttcaaatgattcaaaacaattcctattacctcctttaactaataattttttatataatttatcaaataacgttaataataacaatatcaatatcaatccatcatcatcatcatctacatcttcattatcttctccaaatccatacattcatcaattaccacctttatttaaattaaatccaatacctcaaccattaattccatctattaataataatataactaaaactaataaaaaatctaaaaatttacctcgtaagaaaagggaatgtccaatatgtcataaattttattctaaccttacaactcataaaacaattcatattaaagattcaaaaccttttatttgttccaattgttcaagaccttttaaaagattaaatgatttaattagacatgaaaaatgtcatttatctaaaattggtgattgggaatttaaatgtccttattatagaaaagatattaataataaagaaataaattcttgtcatcatacaggttattttacaagatgtgatacttataaaaatcatttaaaggcaattcattttaaatatcctccaaatactctaaaatgtaatagaattaatgtttcaggtaattgtagagaatgtggtcaattctttattaatgttaatgattggttaaataatcatatagagaataatcaatgcgcttcaatgaaaaaatagttcttctttaatttcttacctttatataccttctttttattttatttatttatagacataccaatgattaaatatattctgatactcatattcactttaattaattataaatatttccctctagtttatacattaagatttacttatattataattaaaaatctttattggaaaaaatttactaaaaatactaaaatttcaattgaatcaacaagatatactaattgttcattatttgaatgtgatttctttggttttcataaatctaattcaacttatttcacagaattagacctttgtagaactcaatgtgtacttaattcaactaattattttattaataaattatctaataatgaatcaattccatttataccattagcttcaattcataattcattccttaaagagattaaaccattacaaaattatcaaatgcatagtaaaattgtttcaactagtgataaatgggtatatgttatgacattatttaccataagtaatagtaatggtagtaataacagttatatctacaacaatcgacgcatcgccgccatttcaataggtaaattaattttaaaggataaaattaataaatcaactatttcaccttcagttttacaattaaattcaaatttatcaaatgaatctgatctactctctgttattgattcaatacctgatttaattaatatttataaatctatataaaattatctatatagtaatgacggaaggttataaaaatcctgcattagcaatgcttggtattaaatcaattaaattaccttcacgtaattggttaattttttggacagttttatcaggtttatcaggtggaattatttatgataaatggcaacaaagaattttaagaaatcaatatatggaaaaatttaataatcaaaatatttcttatcctgttgatcataaagttaggaaattaaaaattttcattgcaccaccaccaaatgattatcttgatgaaagtatgaaatattttagaagatttgtaaagccaattattaattcttcaggtttagattatgaattaattacaatggaaagacaaggtgatataagatttaaagttgctgaagaaattagacaaattagaagaaatctcataaagaaggatttacctgaaccagaaatagtaccagtagtaacaaatgaaattacaccaattactaccccaaaagaaactaaatcagttagagatttatataatccaatggatttattaggtattgaaaaaattttcggtaattttaaggataaaaaaataattaatgatgattcaattgttaatgatgttagaaattcaggtggtattatatgtattggtcgtggtgcatataaagaatatattaatggtattcatgaaggtttattaggtccattagataaaccagaagtagaaaaaattgaaaaaattgaagaattagataaagataaagagaaagacacagaagattcagatgatgataaatatgcaccatcagcatttatatacgccaaggattattcaaatgctacatttgcacctgaatttggtattgatttaaatgataatattgataatatacgtaataaattacgtgataataatggtacaccatattttttcactcaaccaatacttgaactacgtaattataatacatcaggttttacaaaacaatttgaaagaatgtggagattttataataagagaaatcaattaattgaatataatgaaaatttatcaaaattaattaattgtaattattgtaattttacaaatgataaattaaatcaaggtattgaagaagaaaatgattggccttcaagttggttgaaaactgctaaaattaataatagtgaatgggttagagaatttaaaggtgatgatagaattatgaaaattttatcaagttataactgtaaataaaataatctgtatatataaaatataatataaaatacttaattactcagttaaagctctaataactgcaggacgacgcatcattctctttgtccatttataaacttcaggaaattcaccctttaaatcaataccaattttatcaacaacataattccatggtacaaaacataaatctgcaactgtacatctatcaccaactaaccaaactggtgaatcaaaatatcttgattgacttaatggtgttaatcccattgaataattttcagcattttcactatctaattccattattaatgattctctacgttcacttaatgccatttctaatacaccataaactctacgaacttcatcagtatatctattaattgctgatggtaaattaattgaatggaaataacggaaatgtaatgcttgtccaatcattggtgcatgacctgaagtttgaaaaaataaccatgataaaatttgactttgttcaattagattattactccaaatttcaatttcattattatatttattattagtaccactactattattaatttcatttaattcttgtaattttttattacataaataagttataattgaacctgattcccataatgatatttgattattagaactttcattattatttcgtattctaacatttgaattaatatttgccctatgatcaattaatgcaggtactctaccatttggatttaattgtaaaaattgtggtaatctatgatcatttttattaaaatctaaatgaattgtttgatatttataatttaattcacttaaaataattgcaattttaaacccatttggtgcactcctatgagtaattaatgaaaatccatcatttggtggtggattattgaaaaataaatttaattctgaaatattatttaaatcattatttaatggttcaacagtttcttcatttaaatgaatattacgaagtccagaagataaatttgagacatgtgggtcactacgaaatgtatccattatagtatacttgctgtacaaagagaaaataaaagaagataaaataaaagaaaagaaatacaataatataataaacaataaattgacacattcattcccccccataattaaagtcatttgaaacgttgagaaaattcatgaaaaattgtttatgttggaaatgtggctttcttttcttttctttcttacttgttttctttttggtaacggatgttggtctctctaatacgttcgttattagatgcttatgcatctcgtaaacagatatctcatttggagacatctcttaatccaataccaacttggaaattaattataaatcctcaaacatggaaatcaactccaaatttattaattttccattatttatttgtttcatttataatattatttgcaatgacaattactccattaattttaccaattaaattatttatcattcttacattaatttatataacaacagctccattatttgcacaatttttccgtaatggattaccaattttagcttgggttttccttttctttaattcaaaatttataccattagaaatgaagagaccaataagtgttaaagttttacctgcattagaaacaattttttatggtgataatttaagtgaaattttagcttcaaagacaaatactttcttagatattataagttggttaccttatggtataattcatttttcattaccattcgttgttgctgctttaattttcatttttgctcctccaaatactttaccacaattttgttggtcatttggatttatgaatttaactggtgtagttattcaaaatttaatattctcttgtgctccaccttggtataaagttttacatggtttagataaggcaaattattcaatgaagggatctcccggtggtttaggtagaattgatattttattaggtttagatttatatacaacaggatttactaattcacctcttatttttggtgcaatgccttcattacattcaggttgttcaacaatggatgctctttggttatcttaccttttccccaaatttactccattattcatattttatgtttgttggttatggttttcaacaatgtatttaactcatcattattttattgatgttgtagttggttcatgtcttgcattattctttttttcattaattaaatggagaggtaaattaccaattaatgatttattttgtagatggaattatgaaaatattaaatttaatgatatttggttagaagatccattaaaacaattagattattttaattatgataatatgaatgatttagaaattgacttagatacaaacaatgatttagaatctcaaatacctttaaatgatttatcaaatgataataataataataataataataataataataagaataacgataatgataccgataataatgccgataatgaccataatgatgataaaaataaagataaaattgaaaatgataataattttattgaatttgaatctgatgatgaaattgctgaagctaatgatattgaaaaatcaatgcatacttcaataaagaaaactccaaaaatgtataaagaatcatttgaagcaacaatttcaaatccttcttcttcatcaaattcaaattcaaattcaagttcaaatcgtccacctactttataacaatatcttgatctatatacagaaattaattaaatttagaaagtttcaaataaaatacaaatgttaaacgttactcaactactattacctctaccacgtcccctacctcttcctctacctctaccaccacctcttccgcctctagttttaccattacctctacctctagtacttccattcccattacctctttccatttcctcttggactcttttactctcttcttcccaccatctagcaaattcttcctctgctttaatatcttcaatagatttagtttcaataacttcattaataattactttttcaacactttttttacgtttcatttcatctaatgatgggaaatgaactccagttaattttttcggtgcaattattgttgctgtacttatctctaataaatcatttgaattaccttcaataacttttggtgttgtattaccccatgcattattaggtgtccaagttctcctattttccttctccaactctcgttcacgttccttttgttctttctccttttctttctcctctcgttctttttgtaatctttccttttgtgaaagtcttggagttagtttgattttgacagtttttttactcgatgtggttggtataattaatgatggtgacggtgctgatgatgacactgaagttgaggatgctgtcattggatttggtatgattgatattggtgttgttggtggagttggtaatttattaataatcggtctagatgtcttaacactcgacctacgtcgttgaacaacaataaattcattagaatcaccttcttcaattgcattttcattattattaatattattaattgtttcagcttcaactttagttagtggtaatagtttagaaatttgagatttcctacgtgttgttaaactttcatgtttagaaattgtctctttagtaacaccttcaactgaccaaagatatggatgtaaataatattcattatatgagtcagtaaatatagttcccatattggacctctttttcaatttacgttttggtaaataaatataaattaattctttgattcttaaatcaattaatttcatacattcatcacttaaatttgaattatttattcttgaatctttataagtaattggtaaattattgaaaatataccaaacacaattagagaataattgtttagaacttgaaataaatgcatgttgtaatattatatcataattttcaaaattaatacaatctttaattgctaattcacataaatgttttaattctggaattaataattcattagataaatagattaagtcaatcatataattaatgaaatcatcaactgtgtctttacctttgatgagttccttaacatttgaataaaaaatatcgtcgttatattcaccttggaaatatttcattaataaattccatgtagtttctttaacatgactaaaatcaactatatcaatttccatccaattattactaaacaattgtttaaaataatcacatcttgcaattaataaaaatttccaagtctttatttcaacattattagctaatttaactgtaatatcacctccattaagtttgttcatacattcaaaaaatggaattttaggaaatgtatataataatctatcccatcctgttttgatagttggatctgtaataccattattccaaacatccaatatctcatcattgtataacatattaataaatattacaacactacgtatatccatttcaccaattataaacccatcattttcattaaattcaaaagttaaatttttacgatctaaatgaaatttttcacgttcaatatttaatctattaaataaaattgctttatgaacattaattgtagttttcatattagttgttgtattttcaatgtaaatttgataatcataacatttattaaataaacaattatttgataaataatcacataatgtttcttcaaaatggaagtaatcataaatcaatggattatgttgataagcaaatggtgttattcttttagtgaaaactaatccattctctatatcatcattatcatcaccttcatcatcactatcattatcatcataatcttcttcaatataatcttgctctaatctatttgataagaaattagtatcatattccaggccactattaatattttttccatcaagtggtgatagggaaccaatatctgaaatgattgaagaactagtaattttatgttttaaagaatcattttcctttcttaataagactattttatttttagaatcaccattagatataccgaatccaatagaaactgagtaaatattagaaacatcattaattctaacccatttagtcttcgtacgtttaaatgcttcaccacttttagtacataatactgcaccaattgcaccattaattaattcaccaattgagaaatcaattgcattcatttctcctcttgaaggtttccaaactgttgaaaatttcaagtgacttttaaagacatccttagagattgtatattttggaaatgtaaatagtaaaatttcaccagtatttaataataagaaaactgaataattaccattcatattacctgaatcttttgaattattaattgatggtttaattattttaattattttacgtggtgaacttaatattcttggtttaaaagtattccaattattactaatatcagtatttgaaggtaatgaaattttcaaatgttggcctgaaatataaatatgaattaaatttgaatttgtaacaattaaagttgcaatatctaatgctaaagcaaatttaattacatcatcaggatatttccatgtaaaatgtgcacttattgatttggatgaattatcagaggtatgtattgcattagttaatggaccaaattgtcctaaatttaaaccatagatatgaagtgaatgtggagaatatacaactgtatgattatctgatgatgaaacacctataatttgagaagtattagatttagttgaatcatcaatggataatctagtatttgatcttgaagataatgataaagcactaaagttattagtaatcatattcgatgatgtcagtgaggaggcagatgatggagttgtaacagtattggaaatagatgatgattgtttaataattatttgaattggtgttaatgaattcaaatcttttgaatgaggtgaagaaattgttgttgaggatacattttgatataaattaagtctttgaatattaataccaaatgcataagctttattaaatgatgtaactataactgtatgaccattatttattgatgcatctataactttttcacctcttgaaaataaatcatcaaagaatttaattcttgaaaaaagtgcagtttttttaataatatgtaatgggttagttatgtataattgacctgatgaagtgattatgatagaatgtgatgaagttgaaataaattttgaaattttgaaatttagtaatggatttttggaaggtaatggtgataataaattttgataaattggtatgttaataaaatcgccacttgattgtgatacaattaatgaagatgtgtggttataattattattatgataatgattattattatgatgactatcattatcaagtttttgaaattcaccattactatcaatggaatcaaccgagttatcaaatgaggttagatatgaaaataataaatcataaggaatttgcttattcttgtctttatgattcagtagtttagtttgtaatggagtattgaatttaagtaataaattaacaaatgtaaaattaaaataatatatagcataatgtaatacattccaatgattttctatatcatcaataagcaaacaattatgtaaatcttgattattatttaaatattttaaaattctctttaaattataaatatcattattaattgctaaaatatgaagtaatgatctaccgaaaatatctctcttgaatagagtttcagatgaaataattattgaattatcaattgtgttattaatttgttgtgtattattcttagtaaaaccaaaagtatccccccttttggtcttattctttgatctattattgggtattgcggtagtgaattttaaaacatcattgggacggttttccgagctgttaatatgagtaatcgaatgaataatgtgggttagtagaaaggtttgttatcagactatgtggggatagtgtctaatttgcagaaagaggtgttaatacttaagaattaggacaaatactaaagaagaaagtacataaaagtagttaattttgaaataatgaatgaaaatgcacgttgagaagaaagtgaaaatatttgaattttcatgctttcaataaatctattataataggactttatttcattatttattggacaagagagatgtcttttttcatagataacaatagtgtagcaccacagggtgtgtcaagtcaacgtatggaacttgcagagtttcaatttgatgcattaaatggattattagcaactattcgacgtagttgtggaggtaaatgtattccattagattatggagagaatgatcttacaaagggtgaaagtgaatgtactaatagatgtgttgctaaatttatgcaagcacatcaaactgttgctattcatgtcgaaagaaatcatccaataactgataaagatctaattcattatgaacatattaagaaagagtatctcagtggtagtgaagatacttcaactaaatcttcctcttaattataattatattggttaaatcttgtaaatatatagcttatgtattactttatacgtataatacacattaatacacttagtgaatatgatttatgtgtccaataaggtcttacaacgcgttaaatggatgtgtttgtaactacttatagtataagacatgcatacaattaatggatgaaaatatttattacaactgtttgtttatttaaaggctgttttttttcttttatctgttggttctttgtatattaaacactgcatacatacatcatagatgaccatggatcaatcagtcaatgactcagtcagtgaatcggttaatgaaccagtcaatgaattagtaaaggaaccagttgaggaactagctacagaatcaaatcacgctttaattcatttacctgatagtgcaacaattaataacaatgaatcaaatgaacatagattgaaaagattccttttagatagtgatccattaactgaatataaaaaacatggatctgatgatgctgctaaacgtttccaatatttactttcattatcaccattatttcgtcattttattgatattaaatcaacaaatgataaatcattacataaattaattagacaaattgatcaaaaaaatgctacaagtaataaattatcattatctacctcttcatcacgtcgtaagaggaaatctgagaaggaagaggatgcagaacttttaaataatgaagaagaagaaattaatgaatcaactacaagtttcttaaatgaaagtcctaattatattgatggtaaattacgtgattatcaagttcaaggattaaattggcttatctctctttataagaatagattatcaggtattttagcagatgaaatgggattgggtaaaacattacaaacaatttcatttcttggttatttacgttattatgaaaaaattgatggtccattcttagttattgtaccaaaatcaacattagataattggcgtagagaatttgctaaatggacaaaagatgttaatgttgtagttttacaaggtgataaagatgaacgtaataatataattaataatatattattaaaggcaaattttgatgtttgtattacaagttttgaaatgattattagagaaaaatcaagattatctaaatttcgttggcaatatatggtaattgatgaagctcatagaattaaaaatgaacaatcatctctctcacaaatcattagattattttattcaaagaatagacttttaattactggtacccctttacaaaataatttacatgaattatgggcattattaaattttcttttacctgatgttttcggtgataatgaaattttcaatgaatggtttgaaagagagaataaaggtaatgatgaagaaaatggaaatggaaatgaaaatgaaaatgatgataaaggtaaagaagcagttgataaattaagaaagattttatcaccatttctattaagaagaattaagagtgatgttgagaaaagtttattacctaaaattgaaacaaatgtttatattggtatgactgcaatgcaattaaaatggtatagaaatttattacaaaaggatattgaagcagttaatggacaagttggtaaaagagaaggtaaaacaagattattaaatattgtaatgcaattaagaaaatgttgtaatcatccatatttatttgatggggctgaacctggtccaccatatactaatgatgaacatttagttttcaattctgcaaagatgattgtacttgataaattattaaagaaattgaaaaatgaaggatcaagagttctaattttttcacaaatgagtagattattagatattttagaagattattgttatttacgtgattatgaatattgtagaattgatggatcaactaatcatgaggaaagaattagtgcaattgatgattataataaggaaggtagtgataaatttttatttttattaacaactagagctggtggtttaggtattaatttaacaactgctgatgttgttattttatttgattcagattggaatccacaagctgatttacaagcaatggatagagcacatagaattggacaaaagaaacaagttaaagtttatagatttataacagagaatgcaattgaggaaaaagttttagagagagcagcacaaaaattaagattagatcaattagttattcaacaaggtagaaatgatgaaaagaaagaaaatcaatcaaataataaggatgatttattaaatatgattcaacatggtgcacaaaaagttttagatactgatggtgaaggatcaaaagatttaaatgatgacattgatgaaattttaaaaaggggtgaagaaaagacaaaagaattaaaggaaaaatttgaaaaattaggattagatgatattcaaaattttaatggagaacaacaatcaacatatgaatggaatggtgaaaattttgcaaagaagaaatctaaaggtttaggaattttccttaatccatctaaacgtataagaaaagaacaacaatatagtgttgatgaatattataaggatgttatgaatcaaatgaaggttcaaccaaatgttaaaaatgttatacctagaccaccaaagcaatttcaattagttgatttccaatttttcaatcctaaattaaatgagatatttgaaaatgaaatgttatcatataggaaaagaattaattataaattaggtgaagaagatttagatttagagaataaaaaatatgataattttgattatgaagaatatttgaaattaagtaagaaagaacagaaaaatattttaaaagaattaattaatcaagaacaagaaaagattcacaatagtaaagaattaagtgaagatgatattaaattaaaggatgaattaattgctgaaggatttggagattggaatagaagagaatttatgcaatttattcatggatgtgccaaatatggatcaaagaattatgcagagataagtaatgatgttaagggtaagaatgaggaagatgtacgtaaatatagtgaagtattttggcaaaaatataaggaaattgaaggatgggagagatatttaaaagaaattgaatttggagaacgtaaacttgaaagaattaagatgcaaagtgagatattaaagagtaaaattaatgaagttgaaaatcctattgaagaattaaatataatgtatccaccaaataattcaaagagaatgtattcaattattgaagatagatatttattaattaaggcagatgaatatggattattaaatccatatgtatatgatttaattaagagagatataataaatgaggaaatgtttagatattgtttttatttcaaatcacgtacagctaatgaaatatcaagaagaatagttacattattacttgcagtttcaagagaagttgaaggacctgatgcatttaagagaaagagaaaaaatggtattattaaaaataatgaaaatgatagtgataatatgagtcgaccagatagtattgatcctgagagtggagaagcgaatgaagatatgaatggagatgtaaagaggaggaaaattgaggacattagtgtataatacagtttgtaatacagtttataatagtaagaaatagatccaaatacagaaatagaaatagaaatagataagataagataagataagataagataagataagacagacgcgacggtgctgacataatcataaacaaccaccgacgcatcgactccaaagtagaaaaatagaaaataaaaatttgcttatttttgctctctctttatttgttgagaaaatgcaatgctttcaaagaggggaaatactgacattgacgaatagagcgttttcaatttaattttacatgattttatgtgattttataggattttatagatttcatttgcctttcattttacacatcaactgcttgctttagcctgcttagattcatttggttttcgtatattcggtactctttctcattgatcaaaccgtttttcgtagttttcatttaatacttagaatttaaattattaaaaaataaaaaatacaaaagaatatactacaattaggatataatataatctatagaaaatcaattgaatatactatataaatataaataatagatatcattgcaaattaaaacaaacaaaatacttataataaacaatgttaagatcatttaataaattatcaataactaaatcagttgtaagacaagcaactagaaatttctctaaatgtcaaattattaaagatgaagtctcacttaaaattgatggtattccagtttcaattgaaaaaggttcatcaattattcaagctgctgaaaaggcaggtgtctatattccaagatattgttatcatgatagattatcagttgcaggtaattgtagaatgtgtttagttgaaattgaaaaatctccaaaaatggcagctgcttgttcaatgcctgttggtccaaatatgtcagttattactcaatctgataaagttaaaaaagttagagaaggtataactgaatttttactttcaaatcatcctttagattgtcctgtttgtgatcaaggtggtgaatgtgatttacaagaacaaactttaaaatatggttctgatcgtggtagatttaatgaagttacaggtaaaagagctgttgaaaataaagcaattggtcctttagttaaaacttcaatgaatagatgtattcattgtacaagatgtgttagattcttaaatgatgttgcaggtgctcctgaattcggtactgcaggtagaggtaatgatttacaaattggtacttatgttgaaagaaatattaattctgaattatctggtaatattgttgatttatgtccagttggtgctttaacttcaaaaccttatgcatttaaggcaagaccttgggaattaaagagaactgaatcaattgatgttatggatgctttaggttcagcaattagaattgatgcaagaggtatggaagttatgagaattttaccaagattaaatgaagaaattaatcaagaatggatttcagatagatcaagatattcttgtgatgctttaaaagttcaaagattaactaaacctttaattaaacaaggtaataaatttattgatgctacatgggatagtgcattaactaaaattactgaatcaattaaaaaaattaatccatctaaaaatgaaattaaagcaattgcaggtcctttagttgatgttgaaggtatggttgcattaaaggatttagttaatagattagattctgaaaatttaacaattgatgcaccaattaatgaaattccttcaattgatattagatcaaattatattttcaattcaactattgatggtattgaagaagctgatcaaattttaattattggttcaaatccaagacatgaagctgcagttctaaattcaagaattagaggtagatggttagaaagtgatgatgttgaaattcatcatattggtgaatcatttgattcaacttttgaaattaattcattaggtaaaaatgcaaatgatttagaaaaagcattaaatggtaaattaggtgaaaaattatcaaatgcaaagaaacctttaataattgttggttcaggtgtttatgaaaataatgattcaattgcaattgattcaattttaaagaaatttattaatggtaaagaaaatattattaattcagaatggaatggattaaattatttacaacgtcaagcttcaagagctggtgcttttgatattggtttctataattcagatccaaaaattcaatcaattgaaccaaaagttgttttcttatttggtgcagatgaaattgaaccaaaatcaattccaaaagattcatttgttgtctatgttggtcatcatggtgatattggtgcttcattagctgatgttgtattacctggtactgcatatactgaaaaatcagcaatttatgttaatactgaaggtagatcacaaatgacaactgctgcaactggtccagttggtgcatcaagagatgattggacaattttcaaagcactttctgaatatttaggtgttggtttaccatatgaagatattagatcattacgttcaagaattgaaacaattgctccacatcttgtaaggattgaatcagttgaatcagtttcaccagaaattgttaaactttcaattaattcagcaaaagatattaaaccaactggttccgatttagttaatccaattaagaatttctattttactgatgttatttcaagaaattcaaagacaatggctcaatgtgttggttcatttggcccaactatcgaaaaggttaatgatgaaaatgctcatcaatatttaggtttggcttaaattgaataatacaatttattttaacttattaatatttataaacctgtgcttttagtttttcctccttattcatatacattattattatattaaaatatttattttcttgtttaacgattaaaatttcattcccccctctcttaacatatcttaatagttaacaacaattagttaaattttttatattgattatttattattcatttctattaaaattttataaaaattatttatactataaactaaattataaactattttattttatatctaaatcattaaagattgcttcggaaccatgatcatgaatacaatttaaaagccatcttgaaactttattaacacctttctttttacttgcctcaatacaacttgcaatagttatattattaacttttaatgttgttttaaaaactggtaatatacttttagttgtagtatcttgttcaactgtgaattgtggtataacatgtctactaccaaataattgaattaattcatttttagaattactacttatattattgagttcatcacttggaatagaatatggtacctttaaatatttgaacgtttcaggtgtttccttaacctcggtgggttgtttaacttcttctattttttcagtagtgttattgtccttattattatctttattatctatactattcttattgtctattgattcaaattttttactaacaacagattcagttcttggtgtcatcattctaattaaatgatacttttcaattaattttttatttaataatgaagcttgtgcagctctagcacttgcatcttttaaatttctaccttcaccataacctaaaatttctccacctatactacattcaacaactgttggagtttctggggtaatttgcttttgaatacatttatattcaggatgtaatttagctgatccaattaatgcatataattcaggttttgctaatttattaacttcatctgatgacgttaatcttatcgggaatttggtattttctggtagtgtattattaggtggcggagttggtaatgatggtattttaggtaattgaactgatgggattgcaattttactagctgtggatgatgatgtcgatgatgatgtagatgatgatgatatttttgtgttatttttcaaaaatttagcaatcaagtttttacttaaatgactataagttaatttatctgattgttcaaattcatcaagaattggtttataaacatccattaaccaagatttgatgaaattatatgcgtctccatttctacctttatcgatgaaaattgcaccaatatatgcttcaaataaatctgcaattcttttattgttcttaaattttgaatttatatccagttcagtcttaattaaatgagactttaataattcttgttgccattcagggaacttataagctcttgaaataatttcaattgtttcatttttaactaatgtagatcttaataacgttaattgaccttcatcaaatgaaggatatttcgattcaattatatcagatactattgtttctaaaactgcatcacctaaaaattccaatctttcattatttgattgaacctgatctaatttggatgaatgtaaatttgaatttgttgcagatttatgaatgaaaacttttgattccaaaattgaatcataaataacgggtaatttaggtaatatagaatgataatttatatcatcttcttccttttgagaattatactgttcttgtcttttttctttaattaataactggacatcatcaacggaatctaatactgtattatcattaaaattgattatttgattaaatattggtaacttattatcatcatataatgatttaatttgacttgcaagttgaattttatgagattttgctaaaagtaaaacttttgctgcaacttcaccattttgtgaagaatctttatcgagagattgttgtactaaactgtttatgtaatttttcaattctgttgcatttggtgatgtctctattaattttttcaaattttcttgaataagtgaaatagaatgttcaatggatatcagatcatgaattgcaaaattacggaagtttgttgattgttctggttctactgtggtgtcttccttcttatcttctttcttcttctctttcttatcctttctatcctttttatctttcttgtctttcttcttttccttcttctcctttctctcagatttgtgtcttttcaaatcactattttcatgatcatctatctcatgcgttcttttacccatggtttctatataatacggtaaactctacacaaaacagaccaatactgtcaccagctttaaatgaaaaatcatcacaataatttttgaaaagaaaaaaaaattatttttttgtgtgggtgctgcacagccttttaaaatcacctattattatagttgttattatacctgtaagaggtggtcttggaaccgaatatactcttgtcattggtattctgttgagtgtggagcactcggtagagatgttgtggtgtattggattgacgtggattagaattgtactgggattgtgatggtgttgaggaatgcccgattttattaactaaaacatcacctttagatggttcgtatgctgtattagtatcaatatcatccttagtattagaattaatagtggtattactatctttatctagatcattcaccacttcaccccaatatcgttttctttgaattgtaggttgtacattttgtgcagtttgattatttttgttattcattgattcggtataacattctccaaattttagtaaatgaggtttcttttgatatttaaagaacgcatcatataatctatcataatctaaatccaattgtcccaccttgggttggattctttctcttgttctttgtttcaaagttgtcgattctccactatcaactggatcaacagttggtctcatttcagatatacctgtatcactgataaatttaggtaattcaaatggtggtctctccacacctcttttcatagataagaaactcttcttagatctccaatgttgtggtactggaacagaatctggcaatgtttttaagtaaatatgtaatcttggatcttcagcatctgcatcaatccattcaactagttctggatgaatagtttcacttttaagaacgtataatggaataccatatttctttttaaactgtcgtttactaagtgattgaggatttgattctttagaatcttcatctttattctcttcatcatctaaaacatcatctcctttatcatttttacctttattatctcgatgaactaactgtttctgttcaacattttcattttctttctcctcctcctcctcctcctcctcctctacatcaatttcctcttcctttggttcaaacttctccaacacatccttatataattctgcaaactgttcatcaacaggtgtttcttccacaacaactatatcatcatcatcattattattattatcttctttagttttcttaacttctactactttctttccattggatttctcctgttgtttcaataatttcgccctctctcttctcaactggttctttgacttcttagtcaccaccggattatctatctttgatcccatccttgtctagtagtacaatatgaaaaaaaagcagtgtcttcccatagtaaaacttaaaaattcttcaaagcgctgttttcttcaatgagccttaaatggttttccttgatttattattgccactgctttttcttttaagtttttcactattcgaccatgtctgaactgaagaagagaccctctgttactgaagatcttaagataaaaacaattccaacacctaattcagcaattaataaatcattgaaggaaatacaggaaaatcacgaatctaatgaaaattcaccaatatctccaacaacgggtataattccaacacctaaatctgcaatatcatccaatggaccaccatctgctgttaattcagtgaagaaacagaatgagaaaacattgggtgaaatgacacaggatattaaggctcaattgagtaaagcatcagaggagattgagagagcagatgcagagtttcaacgattgttaggtaatttagagaagaaagttgcagctttaagggttaatctgaatgcatcaaagtgattatatgatgatgatatgatatggaatcataaactaaatttacaatgtagcttacagttcaaaatacagaaactaaaacttaaacacactaattataataacaataatgaataactacatgaaaatgctcaaacacagacaactaactattatcatacaagttaaaacaccacaagatatacaagatacaacatccaccacagaaaaggcctcttctcctattacttcgtgtaacaaacgcgttgtttttcttattttcagtttacactctattttcgattctctatttttcactttcttttctttttcactgtatctttacctctatttctatgtctcatttgttaagaagtctttcattttctattctctcactaatataatgcttatgctggagcttgcagtattctccaaaaatttgaataaaaacctgttaccaacagatctacaactaacatcagttagtcaaacgacaagaataaataatttaacaaaatttaaacgattgttaaatacaattacaattgataataatactaaaaataatgaaataataccgaaacctataaagcaagagaagggtaaacgacctagaggaagaccgagaaagaaaattgatacatcatctgtattattacacaataattcaaatttattagataaatttaaaaattttgaaacttatttacaatatgcaaaatttaagcaactacaaacaaatactggtgttttcatgggtaatttatatgaactgcaagttaaaagttttttagagaaacaatttaaaattcaaagtacattacatcaaggtggtagtaatgataaaggtattgatataaatgcaatttggaatccaatgaatattttgaaaactgagaaaacagataaagatggcattagtaataatattgatgatactgataataagaaatatgaaatagttaatatgaaaaaaatcaaacctttggcaaaaagaagtaatcaaacgattaaattatttgttcaatgtaaatgttataaattatctaaaattgatccaaaattgataagagagattaagggatcatcacaagaatatttcaagaaaaatgggaattcagctattttcatgattgcatcaactaatggatttacaagagttggtagggaagattttgataaggcaactataccattaatgtatgcaaaatttactaaacctaaattaattaacaaaagatatccctttgaaattgatagttgggaaataggtaaattagatggtgtatatttaaatcctttggcaactgcaatgtttaaaggactggactggatatcgtttatgaataaattaaaatcattaaattaactaagagatgtaatattatgtataattaggataaaaaacataaataaagtaattaaaggaaataatataaaatttataaaagaacaattatttattattaatattagtactttctctcaggaatattggaaccaattttaacttcagggatttcatcaattttatcaagccattgacaaattcttgggaaattttctaattcaggtaatcttctaaaatttaaccaaggaaatgaagcaatatcagcaatacttaaatgatcaccaactaaataacctgtcttatttctagttaatctttcctctaagacacctaataatctaattgtttctttatgatatctttcaattgcaaattcatccttttgaggtgcataatatgaaaaccaatggaattgacccttcattggacctaaacctgccatttggaaaaataaccattcaatcatttcataatattcagctgaaccatgtttataagaatatttaaaatctttatcaaatttatcaactaagaacattaaaattgcacctgattcattaatatgagtaacttcacccttttcatcaacataagttaatgaaggaattctaccattaggattaaattttaaataccaatcttccttacattctgattttgataaatcaattggtctaacataataatctaattttaataattctaataaaattgtaatttttaaaccattcggagttggtgatgtgtataatttaatatatggagcaattaatccaccactctttggatcattttcggaaataatgtagtgtaccattgtaagttaagtattttctatgacaattgagctatcaaacagacctgaaagtagaaaagaaagataagaagcagcatatatataataaagattagtaattaaatccacttcggatggaaaggtccttttatacccgtagaagaaaattcccagaaaatttaaagtgtggctacatattaatatgaaattattattataaattagatagtattatcgtataattattaactccggagaacaatggagtttgtgttgaccgttgcagagacaaacaggttgagagaacaggtggggttgaagttgatccccgataatgggagtagtaatgggaaaggaaataggaaacacgggaaaggtgatggtaataatatgattaattcattgagtattgcagaaactaataaattacgagcaaagttaggattgaaattaatacctgatgaatctaatattgataaagaatttaataattttgaagagttagagacaagaaagagacaaggtgaaaaattagttaaattagttgatgatattgaaacacagaaacaacaattaaaactaaagaataggatagagagaggtggtattattgacagattggataaatcttccaatgatggatcgaatggtgatttagatttagattcttggttgagtaaagtaggcggagaaatcaaacgtggtgttaatgctaagagattagttttcaaaaatgataaaaaatctaagaaaatagaaacagagttgaaggaagaagacatacctgatgttaagatatcacatgataatgaaaaaattaatgaaatgattgaaaatggtaatgaagttgtgcttacattaaaagatagtaatgttttagatgataaagatgaagatgaattagttaatcaacaattacaacatgaggaggaaatacttcgaaataataaggagaaaagtaaattagggaagttagtaacattagatgatcatgcagatgcaaatgacaagaaacgtaaactagaatctttagaaattgaatcagatgatgatgatgatgatgatattttacatttgaattatgatgagaatctagatggtgaaaagaaaatcaataagataatgaaacgtgatttttctaaattcaaaaaacctaagaaatctaagagttctaatgttcaaacgagaaaacgtattattgatgaagaactagaagaaagggaattcaagccagtgatcttaaatgatgatgatgatgatgttagtagtagtataattgaagatgatttggagaaagtacttaatgaaagtagaaaattaaaatcaaaactaaaattaaacctgaaagaaattgttaatgatgatgtaaataaggaaaataaatcaattaatagtataagtgaaagtttagaatttttagataacatcaaagtagatgaagaaatcgaagaatcagttactaaagataatgaagaacaaaatggtaatgaattattgagggataatttaaaacctgagactgaatcacgttatagaataatattggatgatgaagaaaataaatttaataataataacaaatttggtatttcatctgttttacaatcattaaaaagtaatagtagtagtaaaaataataatggtaaacttggcaacagtaagtcagatgatgttaagattgtttatactgatgatgatggtaatgttcttgatactaaacaagcattcaaatatatgtcacataaattccatggatctaaaaagaaataatatttgtgtaactttacaaaatagcttttttttcaattttttttaatattacaaacagaaaatacaaaataaaaaaggtaaataaatataaaatgtagggtataagttagtttaaatattagactttagagacaattaaattttccagaattaaattgtgtctattagctttaatctcttgagcttcacgcttaatttcattggcatctctattttgtctcttattcttatgtttatcaaaacaatgtctaaaataagaaatcaggcaattgttcagattatcggcatgaacatcaactgagagattacatgtattaccacaaattccacaaactgcaactaaaccttttgcagttttaccaaaaactggaattggcatttcattaccagtagtgtaaacaccatgatctttacaaacatggtgcatatatgaggaatcatcaacgccatgaaatatagtgtttaaatccatacctttagtgtaaggataataagggcataaattttgtgtaattggcttctttgtaccattcttcttatatctgataacaagtggttgataaaagttttgcttttgattacaccatctcagagaaatgtaatcatcgaaagcacgtcttttattaactttatatttccaaccatcttcatcttgaaaattttcaaaatcactaatatcgacatagtttggcagtaatgaagcaacaacatttcttttaatgattgatgtatcaatagcataaccaccaactgctttcataatttggctttcattagtagctaaatttttgaaagctggattagaaataataacttcccaatatctatctgctctatcatatgagagacttgtataaacaggcataactcttttgattgtaactttatgtggtttatttgcaaagctttcttgggttaaatttctttgtggaacatcaataactgtttcggagacagaagtttctgtgatcatttcagtagaaacaacatgttggggaacgttttgtggaaccaattctaattgagacatattgattgacgttgatggataatcaatatcagtaacattgttattattggtattgttaaaaatagcttcaacgtcaaaattatcaagaatattttgaagttcttcttcagagaggattaatgaattttcattagttggtaatgataaaggttgttctaattcagcttgaacttgaacatcaacaacctcaggttgtgggttgaataataattcagaaacattatctgttggttcaatgacagtttcattttcatcaaggaaagcaattgcttggtctaaatcaagttcatttaaaccagtttccatagtgtaaaaatcatcatttggagtaaatgtagtttcagcaagatcaaagtttaaatattcagattcatctaaacctgcattaatatcaatgatagctgcagttaaatcagtggtagtattattggtagattcagaaacgttaacattctccgtttcttcgtctttttcttcctttacaggttcttcgagctcttcacaaagttcatcaatataagcgatttcatcaagtgttaaatcatcatcagttgatgagcttgtgttttcaaaagtagtagtagtagtatctttaaataaagattcttcaaataaataattgagtgattcatcatcagaggaaacaaaagtagtggaagacattttaaaataaaaaaaattcaaacaaaagcaaaatttaatagcaagctaacaaaaaaagcaaataattgggaaattcagcaatgaacaaaaaatcaatgaaataaaaatataagcaaaaggcgaaaatgcaattgctattaaggcggtcagtgaaacgagaggtttaactgctaaaagaagagaaagaaagaagtgaaagataaatgttaaaattaaaatccttaaaagtggaaaagctgtctccttttatagtttttcaaatactaacaaaaactgtaataactgatatttctgaataattgtgaaatgtgttagtgaaaatagctttataatacaaaaaaatgatttcgcttcctaattgggaaaaccaaattgcctatttgggtaaattggtcattttttgtgtcatgtcttctgttatttgaggtatatttctaattaattaatgcattaaacttgcctaaaagggtaatagatgcatctagatcaatttaacttgcatatttccatggttgaaataccttctagaaacaattttatgcatgtttgatgcatatcaagaggtaattctaaattttctgcctttttttcttcttggaaaagtaaacaaactcgtaaataaggtgaattaattgaaataaaaaagtctggtactcgttctttttttctttaaatagtggctagactgaaatgaggagaactttgaaagaatataagtaattaaataaggtagcaaaaatgaaagcaaatactagcaacattaatttaacataaatagcaataaaaagtaaacgattaaagttaagatttataagttttaagcacttttttaattatatacaatattattgaagttaaagaaatgattaatttgggaaatcaatggttaataccggagttttgaaatagcaaattttgattaatttttttgaaattaaaaaaagcatttcttcatgttaatattactaaatgaagtattaaaataaaagaaaaagttttttaaagctttactggattacagacattaataaaatttgaataaatcaatactaaaatacaaaacttttagcttttgttgtttacgtaatcatgcaaataattttagaactagcaatcctatttaaaaacacataattgggcgtgtggcgtagttggtagcgcgttcgccttgcaagcgaaaggtcatcggttcgactccggtctcgtccaatatattttttattctttattttttcacatggggaatattataattagaaagggatgggttttaaaactatttaaaagaaagaagattgccacttttattaacttatttttatcttacttttgctcttccttttcagcattaccagatatgttgtgtattatatagagattatataaaccataagtaatagtatatttataaataaattttattgtataataatataaaggacattttttattattttcattttcattttaaatttcattttattaagggtattgtgtattaatggtataaatatattatattatattatattatattatattatattatattatattatattatattatgacatatattcatcataatcatcatctaaatctgaatcacaatcataatcaaaattagctgcacatgaacttgttggattattataataagatgtattaatatttgaactactactactattattataattaatatttgaataaccatttatcatataagattcaatttcatttgaaggtgaagtatccattgaaatactaccaagatataatttataaccatcaattccacaatctctttgatttaaatcaaatgttgaatttttttcaattgttctatgaactatattattatcacttaaaaaagttctaatattaccaattggtgtaaattgtattataccaccatctggatgattaaattttggatattcatttaaatctatattatctaaattaagttgatcttgtgggatattattagtggtattactaccattattataattaccattaaattgtttaacttttttaaattcattctctgattctgaatttcttcttttacatctaacatttctatgattagaatgtaatggagatgagttagcactattggatccattctccatcaatttttgacgattggtatagtacattgcaggtaatggagatgaatttatgttcatatttctgttatgatgggtcatattgttagtattatgattgttagtattatgattgttagcactattattattattattattattattattattattattattattattggcaactacagttggagagatattaccagtaatatacggatctcctatagtcattataatatataattatccctagtaaaagaacaaagataaagtaagataaaataagataaaataagataaagtaagataatttttcacaattaattaagtgaaaatctcagttcatgaaaaatttgaatttttgactttcatgtcgtctgcagaatatctttttattaatttgatttaatttaccttatcatatcttctttctcttcttctgagatcaatggatctatctaatctctcgactaacctcccactctccactaaacccacagaggaagcatttgatgcaatcaataaggaactttcagatgagtttaaagttggggctcgttcaattgctgcattatatagactttcaaatactaaaaattcattacttatagcaaaaggttaccttaattcaattaatgatatttcaaatctattagataatggtaatatatcctcattggatgatttacgtcagtttttacataataaaaaattagaattatctccaaatgaatcattaaatgaaagcactacaactaccattaacaatcaagaaaggcaaatatcctcatccccatcaccttcagtaccatccaataatacatcttcttcttcacaattaccgcaatcccaatctttacaaataataggtcaacatcatgattttactataaataatccaactaatcatcatttcccattatctcgtactccaatgtcaattgataatactcatttaaaatattatcattcaaaatcaaaatcaaataaattaaattcatcaacaataacatcatcaaatcagtgtaatatatctgcagaaaataccaactctaataatttaatcaatatgaacataaataatcatcaaagtatagattctaattcagataaacatttagataattcaagtgatgataatgtagagaataatgatgataatgatgattttgatgatatttcatttgatacaatgtcagatacttcatttttgaaaagaaaattgaataatgtttcaactatatcaaagaaacaaaaattcaatcaataaaattaattattgcttaatacatagttctaaatatcgaacatgtcataatactattctaaattaataaatatcttttttatattattataatataaatacacttttctaataattatataattctatttctattcatatttatatttataccttacctataatctatcaactaacattgattgtgctgccataaatttctttttgatattaccaactttatcttgttgcattctctcactaaatattaaccttattaaattcttccaatcttcttcactaaattgtttatttttcagttttaaattttcaaaattacttaaaaatttctctcccatactaccaattgtaaaatattcaatagaattatgtataatctctgtatttatattattactactattatcaatttcattatcgatatttttaataacttgttgtaaaactcttaaattaacaatcattttattccatccatttttacccataactactattctacgactttcaaatataactaatttatcaatccaaaatcctaatcctccaaatattctaattttaacttcacttttccttttattaataatattttcactaactttattgaaaattctatttatattattaatcctttcacaaaatttatcaatctctaaatcaacactttcatcaccaataatttgccattgtttattaatcatcatttgaattatactccaaacacattcaagtcgaatttcatatctaattaaaatttcaacttcattcattaaaaattgtaaattttcaataattttattgaattttccattcatttcagaattaagtgctaaatatcctctattttcaaaattatcttcaaaattattactaataacattactattatcattaattatttcattatcatcattatcattatcaatatattcattgaaatttaaattaatattagatatttgatgttcattatcactaaataaacttaaactccaaatttctcttaattcttgtcttaaatcaacattaataattgttttaggtatacctttcttcatatttggtaaccaacttaaaatattagataatgatgctaataaatcaactaatgatctcatattatcaattgataaaaagctatttggattaatatttggtataaattctccaacaattgataatgaatatgttaattcagttgactgaagttgatataattcatcagttttgttattatcattaattaataatgatttaacaatattatttgagatacccttcaatttcgaatcattaatccaattcttaattaactttgaatcacttaattttaataaaatatctttaacttcattaaatttggaatctaatttataaaataatttgaatataatatcaacatatgatggtctataatataatgatgtatctaataagattaaaactttattgaaaaagattttgaataaatttgatgcctctaataggctattaactttccatttattttcacataatttatcaaattgatataataatgtattttcaagttgtgaaataaaaacaatatccataaattggttgaaaaattcaacagcttcttttccaccagcattatcatttaaattatcatgaattgatgttaaattacatgtaaaatcaataaatggttcaataatatatgccatattgaaaatatttgggattactaaaatatttctcttactttcattgatatcatcagaaccaatgaaaatagattcatcaaatttatattgcaaattaaattcagatcccccattattactagtttcaccaaaaatattatttaatgatttaattaaatcttttgaaatcgaattaattgataattgagaaaattcgaaaactgtattattaccagtttgttcaaattgttttggaattttatcaaatggtgaatttttattctttttattataatttgaatccaaattatctaaattatttaataaattattatcaataatataattaaaaattaataaactaatttgcttttgaacttccctccaaactttatcaattttatatttatagccatttaatttaaaaatttcgtaaattgcaatatgtctctgtaataataataataattttttaaaaatattttcaaaaacttctttaataattaaactattaaccccttgtaataaattaaaattcatgaatggatcatccttattcttattatcaaatgataaattaatttcaatttgtgttgggtatttacttttaacctcactaattgttcttctaatcacttgtttaatctctttttcacaattatcaactaatcttgttaaacattcattttctttattaattttttgaatttgtttaaatctttcatataattcataaaatctaccattttgaacttcaatttcctcattttcatcaattatttcattattaataactttaataaatgcaaataatcccatatttatagatgttcttaatgaaagtccggaattaaaatctagactattagtattatcattgttattagtattagtattagtattactagtactagcacgattatcaccgttattagtactattacttattgttgttgataatgatgaagaggtgaaatttttataataaatatatccatttaatttccctaacaaaccatcaaataaaacagagatataactatttaatttaacttgtaaactttgtaatgattcaatattaaataatccattatcactagctaattcatcaatctctttaactaaattaacacttttaacaaattcttgattttcaataaactcctgtaaatcattcaatttcttttgtaattgattagttttatctaatatttctaatgtttgtaaatattcaattctcttattatttaattcattaagtatatttgattttgaattaactaattcattaactgatgataaatttttcctaatattagttaatctatcctgtgattgatttaatgtctcaattgaaattccatatgatccaatactatcattaaataccatataattttcattaactgatctctgtaaattaacaataaattgtttccttaaatcttggaaattttggaaattaaatgattcaccatcttcaattaacggtaatgcaatatctaatggattacaatcatctttaaccaaatttggccaatctgatccaaacacagtcaacacatcctctaatgattgaattgacgaactcttattgttaggcattggtctatatagatatggtagatctctttgatccgtaaataaaacagatgttgttgttacttagtgaaattgaagttatcagccatttcgagcattaatgttcagatcagttaacatactttaatcttcttcttttcttttctttgatgttgttcttttctctatgcgtctataaacgttatctaatctagaagtaatatataatgtaaataaatataaatataaataaataaataagtaattaagttaatgatacgtacctattttggatcatcaaatggatgtctagtttcagttggatcaattttaaaaatatgatcaggattaagaatacctttcttatcaagtgcaaacttaatacttctcattaaatcaatagtttcagtacctagttctctttctaaaaattctctcttttcactaataccaattccatgttcaccagatactgtaccttctaattcaacagccattaatgacatttcattaataattctatgagcttccttaacttgttcgggttcaaatataactaaaacatgaacattaccatcaccagcatgacctgcagcagttgctaataaatcagctttatctaatttatccatagttttagtaattaattcaggtaattttgacattggaacacaaacatcagttggtaaaaccattgcatttggtttaaattttttagcccaacttaatgaattccataataacgttttacgaactctccaaatatcttctttatcttcttcatctttagcaacttgaaaattaaaggcattattattctcaccaattttttgaactttatttataatactattaagtgaattatcatcaactgcactaattttcattaataataaatgatctggataccatttacgatcaccacctgaacccatttcaacaactgcattcatttgtttgttatccataaattcaactgcattacatgaaataccagttttaaataattcagatactgcctttgatgcatcaccaatttctttaaaattcattaatgtaataacttcattctttggtttaatatgtaattttaatgttgcttcaacaataatacctagtgtaccctcagatccaacaaataaattagttaaattataaccatttgaactctttcttggtctttgtcttgttttaataattgtaccatcagctaatacaacttttaatgataaaacattatcctttgcagcaccatatttaacagcatttgtacctgatgcattagtacctaaaataccaccaattaatgcaccaggtgcaggatcaggaccataaattaatccataaggttctaattcttcatttaaatgcccccattcaacaccaggttgaacaacaacatctaaatcatcttcatgaatttctaaaattttattcattttagatacatcaattgaaataccttttctagttggtatataatgaccttcaattgatgtaccaccggaataaggtataattggtattgatgaatcataacaaattttaacaattttagaaacttcttcaattgatgttggataaacaactgcatatggtctttcaccttcccttgcacgtacaaattttgatggatcctctgaatgtgttttaatttcattttcacttgttgttatattatcttcaccaacaattgcaacaattttagataatgcatattgaactctatcatttgatgcataaactaatggtttgagatcttttaatgggatagttgatttagttgattcttccttattggcaagtataaacccaactgcaaacccaactgtaaggaaagtcgttgaaagtgcaaatgttttgaaaatatttgttttgggacttaaagaactatcattgactgttgtttgactgtattttctacagaaagttttcaaagatcttactgatgatcgtgaagtacgtgtaaatgcccacatatcactctaccactacagaaaatacaaatacaaagacttacttcaagataagattcatactattgatcaaagtgaaaaatcccacatattttttcaccctgtgttgcaactgttgattaatctttccacctaatagacacttatttgctgatatactaccataaaccgttgttagtagtgtaattgacaatagctcatcgtccagtgatcataattgaactgctatatgtcttctattgaggttatttcactataaaatgtgccgtatagatcaaaggcctgactcattcagagacttctattatcggacatttcctatttaggaaatcccatcaaggtcgacatgttataataaaccaatttaactactaggcacacccttctttcttttggtttgtattggtttaacatacattcaaccatcaaacaatgcttcctgaaaaccacaatgagttccgtagtgatacatttactacacctaactgaatctatgattaaatcaattagtttagcatcaatcggtgattcagtatataatgaagataaagatacaattgcattagagaagagaattgcagaaatgatgggatttgaagaaggtttattctgttgttcaggtactttatctaatcaaattgctttaagatcccatttattgcaacctccacattcaattatttgtgataatagaggtcatgtttttgttcatgaagctggtggtttagcaactttatcacaagcaatggttactgatattattgcaagtaatggactatatttaacattagaagatattattaatagatatatcccagatgatggtgatattcatgcagctccaactagagttgtctcattagagaatacaattcatggtttaattcacccaattgaagaaattaaacgtattagtgaatggtgtcatgataatggattaattttacatttagatggtgcaagaatttgggatgcaagtattgcaactggtattgattttaaagaatatggtaaatattttgactcaatttcagtttgtttatcaaaaggtttaggtgcaccaattggttcagttttagttggttctaaaaaatttatcttaaaggcaaatcatttcaaaaagcaaaatggtggtggtattagacaatgtggtatgttagctagaatggcaatggttgcaattgatgaaaatttctctaaaatgaaatcagctcatattatggcaaaagaagttgcagattatgcagaaaatttaggtttaatatttgaaataccttgtcaaacaaattttattttcttagatcctttaaagaacaaaattgatccaaaaattataactccaatcggtgaaaaatataatattaaaatttcaggtttccgtttatcattctctttccaaacaggtaaggaagcagttgaaaatttaaaacttgcattaaaggaaattaaagaatatagtgaaacaaatccatatgattcaaataaagcagttggtttgtatcactcaggtaacaaaaaacaagtttattagttaatctattatacataaagttgtaaattatatatacacattaatattaataattctagattttcagtatttatcatttaattgtaattagaacctggtcccatagaacccataatgttattgatactgttcgtcggattcattggatctggagaatttggaaggttggacatacccggaatgttacccatattacccatgctacccatacttggcatacttggaatacttggcatacttggaatacttggcatactaggcatactttgcatgctgggcatagtttgcataccaggttgaatattttgtattccttgcattccttgcatattttgcattccgtgcattccttgcatactttgcatactttgcatactttgcatagttggcatgttttgcataccaggttgaatattttgaaccattgtcatatttggtggtatattaccgttttgcataccttgaaaattttgcataccttgcattggcataccttgcatattctgtatattctggatattttgcatattttgcatattagaaatattttgcatgtttggtacgtatggtgaatgtgtacgtgacacatgtgaatggaattgttgtactggcagttgttgcatcggcatgaattgtggcatatttgatatttgtgatatcattggcttttgttgcaaatattgtggttgttgatgttgtggcagaggttgtgagaatgattgtgattgttggtattgatactggtattggattggagctggagattgctgagatgatcctggtattattattgaatttctagagtctttttgtggtgtatcacttcttgaaatattggattgactttttatataactaccatttgatggtgaaacaaatggagaatgtgaagttctctgctgttgctgttgctgttgctgttgctgttgaggtatttgtaacattgtttcattaattaatggtgatcttggtaaaatatcttcatctttaagagttttattatcattattagcatttctgttactattgttattacggttagcattactatcaagtacactatgatcagtaaattttatacctaacaaatcattattagttgatattaaaccttgacttattgatgaactattagaaatattacccatcgcaggactttccttttgcatttgttccggattgaatgatgaaattaatccaataacatttttatacttatccatttcaaattcagaattcattaataaatcaaaatcttcaggtttatcaccagttgtattaatggaatcattgattgatttaccaatattattactcatacttacaatgtcatgatcattttttctattcttaatagtttcattctctggtttggaattgttaacattcacattattggttccattttgtgggttattaaccatattcatattattgaggttgctgttcatattcatattgttggtatttttcttttgattaatatttgaattactattactactattatttgaactttcagtacatctataaacatattttttcaattcacataaaaagttcatcatatcattaattggttcacaccagaaatcctttaattgtgataatgatgtaagtgcaagatcaacaacatattttctaacatcacctgtaaaatctagtaattcatcttcaaaaataaatcttttaatttcttccggtaaattattaagattatatcttttagtaggataatgataaatatctcgtataacaaaataaatatactggaaaggatttgcatttttagtaaaccatctatattttgataattcaggtgaaacgccaactctaattttggtttcgtataatactaagattgaaacttcaattgttgtttcaaaatatggcatacgtaaagttaaaactttattgaaaaaatctttatttgaacttgcttgacttaacttggttaattcaacattagcagcattagcaggttttaaaataactctattatgatgagaataaggtcttctatcacatgctctatgtaataaataagttctatgaacgaaaattgctgcatttgaaactaaccatcttaataaaattttagaatattttggatttgattcacaactgaaaatttctttaactaatgtattaacatcttgatataatgcaacaacagttttagcaataccttcccatcttaataatctttcattatcacttgaaaaatcagaatttaagaaatgtgaaattgtttccataaccaaactacatttaaatctactaattgtaaaaaccataaaaggatttaaatcaccatcaaatttattagtttcatgattataatcatatttggaaggaaatttagttgatgcatttgtcataatcatatgaggagacatacctgaaacaatcgaagctgaagtatctaaaaatctaacataatgccaaactagtcttctaacttcaatatctttaatatttttagtatttggataaacatcatgtaatagaggatctctatgtaagcccataaattctgattgtcttgctaatgatgcagtatatgtgaaaataccaatataatagatacaactactttgaaataaaatgattgatgattgaatataagctaaatttggattagttctgaaaccaaaaattaatttaaacttttcaaaagtatcataaactctactcttttcatcttgaattaattttaattttgaaggatccttttcattaacttcaaatgctgttttaacagctaataacattgctaaaaataaaacacctgagtcaatatcaaatctaggattttctggatcatttaaatctttccaaaatctaatataattattcattgtaatttctctatcaataattggtattaaggggtgaatataatcccaatataaataaatgatatcatcaaaactttccttttttggatattcttcaactaattgatcaagtgtaattggtaatccaaatctttggaaatcataagttccaatatgtgagaaatcatttttaatttgtccactttcacctacttcactcattttaaacaacatcattctatttaaacttggttctaaatatgggaaaaatgctcttgaataatataatggggtattacttatatttgacataaagactggattattagattctttcaattggacttttttcggtactttactactattctttttattattagtttcaatactggtatttttactgttttttgctttgctggccttactggtactagtagtgtcattgcttttggtattagcattgatatcatcattactaatatcatttttatcatttttatcatttttttctttataaattgatatttttttagttagttcatttgaaacattttcataagcagcaacaatatcaggatttaaatcatctttcaccttcggtacagtttgtaaaacgtgacctgtataatcatcatcaatactattgaaagcatgaggatcaattttatccttaaaatgataaacacaatcatgtttagttcttatacatgttgaacatggttgattacgatcacatttgagtttatgattataacaatattcacaagtgagaatacgacgacgtctgcgcaatttaggcattattcactgttaattaatggagatcagatacgataagagtatagttgtttatcttactaataacatcaaccaagacaatgtcgtcttattaaatttatgcacgtaatcctaaattagtgatttttttcgattttttcttaagggttgcaccccatgtctatgatgtaatgattttctttctggttttcattgaatatctattgtattatcattaggtattattattattattattaaaagatcattaaacattatataagtagaaagaaagaagaaggaagaaataaagaaacagagaaaaaaagaatggagagaagtagtgtctaaaagtagcagaaataataaaaggtctgtaaattatagatcaaacgttatgcagcaccagcagtactaccaagatgattcattgtagtctcttgtccaccacaacgaacaattcttttaccctcagtatcattatccattggaactgatttgttttcaattcgttgttgtttccaataaatattttcactaccacctaatttaccaattctcattgtagctaataaatttttagctgcatttgaatgttgataaactgcacctgtaaatgcagttgttgcatctttaccatgagatgctttaattaatggcaatccaccaggatgatctaatgcaaatggtgtaacatcatgaattataccaaatacaacaactaaatatcttttaccctttgaattttcagataaaattttaaattcttttgcactataaattggtaaattttcaattggtataccccaattaagttttgatctaatactatcaagtaaaatttgttgttgttgaattaaagatttttcaattgtactttgatttgcaatttttaaattattaattaaaccaattaattgtaaaattctaattgtccatttagttggatcaaaattataaatttcataaccatttctataatccattgggaattcatgatggaaattttgtttaccttcacccattgtaattatacttaataaatagttatctctaacagatttaccattattataaggtcttgaaccaattgtatgaccaattgaattaattgaaaatatacaatgttgaacaattataattttccagaatcctccataaattaaaccaccgatataatcattccaaaaataaccacaaattaaactaggtaatattaatccaattgtgataaataaattaaaataatatttagcttgccaattaacaatattttcatttggtaattgatctaattttgattgtttaatagcaattgaaactttattatgatgaattaaaaacatccaaccaaaatgactgaaaaatatacctttccttatgttatgaggatccacatctgttacatcacaatatctatgatgagctctatgagaagaacaccaatttttagctgatgttataccaccacctgcacaaataattgataaaatttgaacaaaatgttcatttgtaaaattaaatgaattatgagaccaataacgatgataaagtatattaattgaaattattgtaataaaataattccaaaatataaaatataatgtatttttgtttattttagggtgatatacgaaagttagtaaaatacctaataaaggtattaaaacaacaacagagaaatttttccaatgaatatgagcataccaatgtcttaaattccatgaacgttcagataattgactccttagtatattaacattattagctcttgatattttcaatttcttcttctttttgatcttaacaacaacaggtttatcaatggtatcatttacagtattaatatcatttatatcattaaaatcattgacattctgagttatatggttactttcaatattatatttggcaagttcctcatccggatacactgcttcctctacaccatccataattatccaaggaaagttccaatgaaaaagaaaatgatgtgataaatctatattattacagaataaatcatcaccataacgaaaataaaaaaatctagcgagcttaatgatttatatatacggggttatacagtgttaataaagtagagattaagagacaactacgttttgatgtaattcaggtacaggagatgaaattgcattgacaagtaatttgacaacatctgccttcttatcttgtgcagttttcttaattttagataattcagttttaacttcagtttctgcagttatctctaattgttcatttgaacctgcaaattcatcttcaaatttctttaattctgctgctttctttgccttatatgcttcaatttcagcttgtgcatctgcctttgcagcctttaattttgatgcacgatattgtcttgcctttgcaacaatttcttgtgcatccttctctgttttaagtaaacttttaacaccgtcctattcaattagtagttagtatttaattcctgaaaaaaccactatagttcaattctgtgataacataaattatattacataccattgtaatgaatgatcctggatattaaacaatatttatacaactcttaaaataaagtaacaatcaatactaaagctgttatcttagagaagcagccaaaaagtgaattttactgtgtgaggttaaaatattattatgcaccgacccatcgaccatgttctagtgttatagacgcaccgaccgcttacatgaattcatcattttcatattcctatacgtattacccgattaggaaggtgggagatatacagtgtctagttcatctaataaatctttctgtccatagagtaactcctattatagacacgaatattcttaaaataatggacattctcttcattggagagtggaatctgcttcaatgcctttttacccaattgtcgtaacacactacattcagatgatccaattacatcatctaatgacgctaataatgcaatggtccatacgtacaaattttcttcaagattaacacctaaccatttagtacaataaactaataatttaatatgtaaattttcttcaactatttgtgcaacatattcacgttcacaacttatttcccaaataaaggttttccattcctttgcagtattaggtaattctatcgcatcaagtttcctctaattgcattcgaaattctcgatattcatccctcttcaactgaaattctcgtatatacttggatatttcttcaggtatatcattcatttgacttttacgtggtttataataaactttatccatatcaccatcatcatggtcattactaatcccattccccatatcatcatttaaagcctctagtcgaacttgtgcaagatattcttcaactgtactaggtataacatttaatttaacatcttcaatattaatatttattggaaatgctcttctttgtccaaacttattatctaatggtccactaacatgccccaaatatttctctatatcatcatcatcataatcagtaatttcattatctttcctctttttagtacctggtaatgatgttaataacgcatcaattgatcgtttactcattgaaagaggagaagaagtgtcaatgataaaattacgtaattttgtaaatgtactttattaaaaatttacacccttaaaaatacaggataatctattctttagacagatactaccactctcaattcaatgtcacttaaacgacagagagaatctgatgatgaagatgaattacaggtgaaaataccaattgttgaacaaaaagaagacgtaacggaagaaataatagaagatcaaaacgatcaagataaagataaagatcagaaaaagactaagaataagaataataagaacaaaaaacctatatcggagcctatatcaattacatgctcattaccaccaatatgttcacaaaatccgtgtacttttgaaacatacagtacatttgaattacatattttatcaaatcatacaaatatttgtacacaatgtaagaaaaattttccaactgcaaaattattagatctacatattttagagaatcataatccatttattaaaattaaattagagaaaggtgagccagtatttggatgctttgttgataattgtgatagagttttcaaaaatcataaaaagagaagattacatttaattgataagcatgattatccaaaagattatattttcagtattgttgataatgggatacgaaaaaatgattcttcattaatcaaaaagaatcaaaataaatcatttggagtttggaaacctgcataattaaaaaaaagagaacataaactttttaacttttataaagactttttatataaaattaatattaatagtgataatctaaatttaatatggaattaattatgaaaatgtttatttgatagataataatttaacatcgaaggttaattcagaatttgctggaatacctggaagtttagtactaccataagccattggagctggaatgacaattcttctttcaccaccaactgccatacctgcaacaccaacatcccaacctttaataacttcacctttaccaagaccgaaatggaatggtttaccagaagtgtttttatcaaagactttaccgttctttaatttaccaatatatctaacaccaactttttgacctttcttacaaactggaccagtaccaaaagttttatcttcaatgatgacaccacctggtaaagttttaacagctggtttcttcttttcttctttctttacttctttctttatttctttcttttcttctttcttttcttctttctttagtttcttttttagtttccttagctttttttagtttccttagcttctttcttttcttcttcttatcttctttcttttcagctgctggaccagttggaccttgctctaaatctttattaaatttaacagatttttcctttttagaatctttctttgcctttttagtatctttaacatcaactgcttcatcatcagcttgtcttttcttgttatcttcttcaactaattcttcaattttaccttcaatatcttcaacattatctaattcatctaaatcatattctatatcatcaataatttcatcttcatcaggtgttaaatcatacttcatcactatcataatcatcttcatcatcagtaccataaacataatcatctgcatcttcatcatctggatgattcaatgtaattaccagttaaatgaacagtataagaaccagtaacgacaaagaaaacctttttcatctggtaagatagtaacatctaaagtttgttgatattgagtttgtggagaaagagtacaaatgatatgttcttcaacagcttcatcatcttcaaaatcatcttcatcatcttcatcatcttcatcgtcatcgtcatcgtcatcattcatcgtcatcatcatcgtcatcttcatcatctttttcttcttttatttcagcatcttcttcttcatcatcctcatcatcatgagaaccatcacaatcttcatcatcacattcatcatcttcttcacctgcaaaaatatcagcttgttttaagattcttaaagttgaaggttcctttttatcatcaacagcttcagggtcaattgaagctaaagtaattctaacagtgactgggaaattttcattttgacatggttgaggagagaatggttttaattctaaattatatgaagcaattggtaataaactagccattgtatgtgtatttatttaactggtatttaattgatatattaatttccaaaagaaaagtatgtgaaattagaattaaatgaaaaataaagtataaaattttttttacatgtcaaaaattttttttatcactgtatagtaaatttaattatggctgaaaaatttgaattttgtaagcttaaaataataataatagataatagtttttgataatatgttacctatattctattactatatcatatctacattctacattgtaatagtaaacctaaactcgatagtaaaaactacttgatagtgtaaattcataattgaaagttatcttatcttatctaataatttttataaagtaaatacaatacaatactatactaaaataaattagaaaaccattgcatgtggtttatcaccagattttaaggagaaagaagctgctaaatattgttttaataaaggagttttcttaatttcagagattaaagctttatcaataattttttgatcttcaattctttcagatttaatttctttctttgcagaaccttcaccaaagaaatcagattcagattttgatttcttacttgatttttctcttgcaaaatatgagacattgaattttgataattctaatgatgaaatttcaactttagttgaagttgcaataacatatcttgaattaactcttcttaatggaacaccattaaccttgaaaggaccagagactaataaagtaccatcttctaagttctttaagtaaacaactctcttacctctgaatctaccagctaataagattaagacagtacctggaactaaacttgatcttaattgttgtggctttgcagtctttctagttttcttagcaacaacttcctataataaaataataataataatataataatgataatgattatgttagtatttatgttcattcaaagttcatttaattaatttaacatttagatatatataatttggatatatgtcacgaataatcaatatttcaccaattggaggggatcaatatcaccatattcataacttataaccatacttatacctataacatcatttatttgatatattatatatacataccgcaaccattatgtctacttgattaaaagatgcaattcaaagtcgtaaaatctgtagtaaaattaaaaatttccaataaatttagtattataaaggtgaaatgtaaatattcttcaataatagctactaactgtgaaattctcacactaattctcaccaatatctaatatctcatttctcactatgtggaaaaatatggaagagaaaaaatttgtatcggaggtgcgcgggggtgtttcctctttgggacaatgatgttttctgctgcgtctatccaccctgggacctataacagatttggtggtattgcatggttcttcctcatcaaagaacaaatcactccagaattcatcattaaaggccatgtattgttgttcccaaggcaaggttagattctggttgaagttatattagtagtagagttattaggtggtggcatattgttggaagtattattggtattattcgtaaaccatgtatttattgtaggattattattagtttgattaatattagaattattattagtattattagtattagtatttggactatgaataatttgtaatattggagttggtggtgatgatacacttgaatattcaggtgatcctcccatatctgtacttgggaaataattattaatactacttatccatcctttcttatcttgtggatttaaatatgtgaatgatgtagtagtaggaccgctgttatctatattattacccgaatcggtaataatattttcaacattattattattattattattattattattaaaattgttattattggcattattattattagcattattaatatcattgatagtagatttatatgataaattccattgatttaaacatgtatgaataaataaccctaaaactattctaacctttttaataaaatgattttttgaaaattttatagttgtttcatcaatttttttaattaattgtttaattatattcaaactttcatctgtaaataatttacccttaccatttttaggtattgttaaacttaaatatctgattcttaataacatacctgatgtataaagtattcttgatgtatgaaataatggattaactgccatttcattaatatttaatttattaaaatgttttaatgataatatacatgattcacaaatttgatgtaatgttgaataaaaaacttcattatattcctttgttgtaatttcctttgatttaactaatgtttgaattgcaggttcataaatatatgcttgaactgaataaatatatgacattaataaattataatcacttgaattttctttaaaattattaataattttaactttaagtaaattaatttgatttaaataatcaattaatgacattttatatttattacttgataattctaaaactgttaattgttccgataatttatgtatattattataaataaattccattaaatgattcatctttgcatatatgacaattaatttatatttccttaaatttgaattctctaatttaatacaacattcttcaagatattcagtccattctaaaaatacaactcttttgaaaaaaaatgatattgccatgtatattatataaacaattaaaacaattgattttatttctaaacttttattatcttccttatcattatttgttattaaagttttcttaactgatccatcatctttattataaaaaaaatatggtctaccattaatacctaaatcatgaaccattgaaacacataatgatgtaaacatatgatatcttctatgatgaaataattctggtgctgaataccataaaatatataataaagtaatttttaaaatatttaaagatttattaccaattaataaaatttcacttgaaattgattttgctattaaacattctaattgtaattgaacttcaattgaaatttcttctctattatcagctattaatgcaatataaatcattaaaacaaataataatggttcatgttctctaagataattaatatttaaattatgtggtaattcaataaatggataccttggataaatttcattaatgaaaatacttaataatttacaacattgtgaataagttaataaattattacctaaaatatctaatgaaggcatttgggattcacataattgaactctcctctctgcagctttaataaattgtgaactaaaagttgttgaaatatcaaaacttgaattaagtgttttaattgattcctgtgacaaattatctaattgtttaatttcatttgaataaatttgaagtttttcatttaatgataaatctttaatattattatctttattgtcaaaacctttcaaaacttttataatttcatcccgtttccttagttcttctcttaaatgttgaatttcatcttgagtaacctttaatttcattgccttcgttaatggttgtttccttttaggttttttaacaattttatattcacaattaactttctttttaacacatcttgtacagggtccattgattaattttgaatcaaccggtacacatttaacctttaatgcatgacatcgtttacaagcattggatcttctctttgatctagtggcaattgatgatgttgtagaatcatcatcatcttcttcttcctcttcctcttcttcttcatcatcatcatcttcatcctcctcttcattattatcttcatctgaattttgatcccgttcattatcattattagttccattattattagtttcattatcattactattattatcattactaccattacctaatttcacgtgtccgaccttatcaataccactcctattcacaccctcttcacggtctttcttagttgcatcgccactcgatgaatcaataactgccttcttgacatttttatctccatcaatattaactccattactattctgataaacctcccttatacctctctttctccttacaccaattccattatcaacactgttctccgagagtgtaaacatgctgtaatacctgcgtggagataagtctaattgccaaagagtatgtgcattaagttaaaaaaataaaaataataataaaatcggtaactataataataaatgcacatgcacccttagtaaattttacatttttatctccgcctatttttttgggaagatatctccggattttaatgtttttgtataaataccattaataatcctctgtttgactctaaactccattctttttcattcttcatttccccatttctcttttaaaacacaactgacaatgtctcaaatgagtaatcctaataactcgtcatcttcaaatgacagagactcaattaaaccttaccctgatgaagaagctttaggtgattatggtaacggtaatggtaatggtagtgaacatggtaatggacttggtagaaaaacttcaaatttactggatcctgataatgatttgattagaacagtttcaaattatactttagctaatattatctctggtgaagctgctgagaaaacttatagtgatgaaaaattaattgatgaaggtaaattaccacctcctccaccacctaaatatggtatatttgcaccagagaacagatcattaatgaaatctttcttacttaaatatatagttgtgattattgcattttggacttttatacttagtgtttggtcaatttattgggggtcaatgtatcatagagagaatagattaattaatttaggtatattagttaatgttgaaactgatatttcattaccagtttctcaagcaatgtatttatcaacaattgatccttcaatttcaactagtttatcatggcattttaattcaaatttaactgaagatgaaataattcaattagttcatgatcaaaaatattggggtgcaatttatgttacaagtaataatgtttcaaatcaattaattaatgcttttaataatggtgaaaatttaaatacttcaaattttgttaaatcttattatgaaactggtagagatccaaatacaatgggttcaattgttgaaccaacattatacagatttcaatcagttttcctcaaatatttacaatcggtttcatacccttcaattttaaataatttatcaacaaatcaatttgcaaatttacaaaatactaatttattatcatcatatccaattattgaatatactaatggtcgtccaactacattaataactattgctcctttacaagttggtttaatttatattattattattactttctttgatgttatgtggacaactccattatatggtgcaattgcaagtaaaatttatccaatgcattatattattttaagaatggtaatatcacaaataagttatctgtttatttcacttgcatttacaactcttaatgcagctttccaaattaatatgaatcaaacttggaaaggtggatttggtgttttttggatgatttcatatttaacaatgtcagcagttggtggtgcaaatcaaaatgtttcattaattttattttcaactttcccccattaatgggattttggatgcttttctttgttattattaatattagtgctactttttcaccaattccattatgtccagatttttacagatttacctatgcaatgccaattaagaatgcttatgaattattaaaagttgttcttttcgatactgcaagattaactatgggtagagattttggtatcttaattgcttggggtgctgctaatctgattttattacctttctgtatattattcttcgctaatagaatgaagagtaagatgattaaggaaacgaagaaacaaattcaattagaaaaagaaggtaagaaggtttaataatacaataatttcatcatcataaatctacattaatttattagcaatgtgggaatatgcaccaaacttacatttaatgtaacgcatttaattccgtttagttttttaagctctttttttcttctataaaattttaccgtatactaatatttaattttttaatgatatccacatatcatttcctttctaattttcttttaataccaaacattaacaattttaccattttgtttaatctttaattgtgcatatggtaaattatcaactttaataaatttttcaacttcaatacctttaaaaacatttatacgtggacaagattttaaatcaattttctttaaattaattaaatttgttaataaataatcaacaccttccctagttaatctaatacatcctcttaatgatatattttcaagttttgataatttaaataattgtaaaattgatgaatcactaacagctgatccacaaaatgataaatctaattcaattaaattatttaaatttgaaattaatgtaattgaattatctgttaacatacaacaaaatgataaatttaaaaattttaaattaggcataaattgtgatattttcaaaattgtttgatcgcttaaaaatgtacaatcttttaaaattaatgtctctaaattaatgaaataattatttgataaatttttaaatcctaaatctgtaattgttgtacatctcgttaaatctaaataagttaaattttgaaatgcaaaattaaataaatgattcattgaaatatctgttaaatatttacagtaacctaatattaaaactgataaattattcattgaaggatttttcttaattaaatttaatataacatcatccttaattttcctacaatttgaaatatctaaatagattaaattgggacatgaaattgataaatccattaatgacattgaatttaaattccaattatttttcaaaattaatttcaaaattttaccagaaattgaaatttggtgaattaaatttgtaaatccattatttgaaatatgataacaatttgttaaattaataacttttggtcttgaaccaactaatttaattatatttaataaatatgaatcatcaacttcattacaataaatcgataaatctaattcattaaataaatttggtgataaataaattaattgtttccatcttgcacaaactaatgaacatttaactaacgattttaaatctaataattgaaatactttgataaataatgaatcagttaatggaccaagatttaaatttgaagatctacgtctattttgattaattgatgataatctttgtcttaaatcatgtggtacatgaataaaatttgatttagaaatatttgaattgaatgattgtaatgaaccaattgaaggatttaatggtggcattgataaaattggagttgttggatcattaacatcagtattatcaaaagaaaatgatttaaacattggtgttgatgaatcatttgaatttttattaaaaggatttttgaataatggtggtggaggtaatgaagtagttgaatttgaattattaattgatgaattaattataatattatttggtgatttatttgttgataatctttgggatgcagtttttttaaaatcatttgcaatatcttgataatttaaacataattgatctaaagtttcagctttaataattattaattcacatttattaattgcacgaattgatgcagatcttgaagttgggaaagtattatcattaagtaatgaagataaaaatgcaaattcaccaaaatacatcattggtgataatcttgcaacagaatgatcattaattaaaacttcaacatcaccataaacaataaaataaatatctctacctttatcaccagattggaaaataaattccattggttgataataactaatttgaacattaagtactaattcatgcattatatttttaggtaaggatttaaaaatatgtaaatttgataaaaatttactaattgaaattgtattatcaattttatcaattgaagtatttaaatcattaaaattatttgaaattggaggtaaagctggaccaggtacttgagcatttaaatttgcaattaatgaatgatttgaaggtgttaaagaagattgaattggttgaattggatgatgtttattaatattaatattacttctttttttcaaaactgataatctttcctttgcttcaagatgaattattttacctatattggggaaattttcaataactgaatttaatgaatcttttgttaaaacacctaataaaacttttgatcttgcaacaacagttgcagttcttggagtattaaataaaataccaatttcaccaaagaatgaaccaggtaataattctgcatataatgattcaccatcagttgaagtaacagctactgaaccacgtaatatccaatacattgctaaagcaggttcaccagatttaacaatatattgatgagttgaatattgaactaaatgtaatttagatgataattcattaaagaattccactggtgcatttgagaataagggaaaattttttaaatgaaatattagatctggtggagttggtaatgaacttgtagaagttgaagaatttgttgaagttggaggtgtaatttgaggtatagagtttaattttaagcctcttcgacggtggtggtgtcattatgaagtgttattattattattattattattattattattattaagataagattatatttctactttggtgactgtgttgtattctattagtataatcttataatcttataatatacagagcttttattcatgcaggtacgatatgatgggggcaggcacgaaaatggaaaggtgtaaattgtaaataaatggaaaatcattcgtcatgcatggatttataataatagggagttgtaaatttcttgaattttaatgagagtttttggataatttcttaaatccgacgtcttaaaatctattaagtaacttttactaatatgttcggctataagaacgtggacggcattaagaccggatttaatattattatctctattatctctattattaactgaatcccctctatctgatggcaatgcaactataatggataatccaccaggtgatgatagtatatgcattgaatattgagcagttgagaatgatcttagagttggataagttgatgatgattgacctaattgctgagccaatgttttcattgaatggacgagaccatctaataaaattggatcaatatcgttttctgtagataatggttttaaaattggtgtgtgtttataatatacccataacatcattatattagtgtggtgtgtataatagtatataatagtatattaatatatattgtattataagataataaataaactaactagaagaaagagtaaggtctacagagtgttattataataatataggggggggggggaaacccaaatattttcatttcagagatcaaggagggaaaaagagtttgcggctggtgcggctggtgcggctggggtttgtgtggtggtagtagtagtattggtattggtattggtattggtattggttggggttgaagtatgggatggagtgtatgatggggttgtcttgacatcaggagagaagggagctgaagaaatcaacattggcaggtgcagctggtgctggtgttggtgttggagctgatgtagtggtattaacattggaattggtaaataatggagtgttggagaaattgtttgtttgtggttgtgtgttgaataatggttgtgtagtagtagtaatattactaggtgctggggcagttgttgcagctggtgcactttggaaatcatcaaattcatcaaaatcatcatcaagtaaatcacctgcagattgtgcaactgttggctttgcagttcttattggttcctttgaaacaggtgttggaccattagatgatctacgtgcattagatgaatttgaggttacaactggactttcatcatattcttcaaatgcattaccacctgttcttgcctcttcaaatcgctgaccataaactcctccatcaccgaaaattcttgtttcatattcatcatcagctgatacactaataccacctctacctgaacctaaaccacctctatttctatttgtataacctcttgtactaactgaagttgatgaaattgcatcaaatttttttgcattttcttttgcctttttacgttcagttctaatctttgattcatcattaagtaaattagttaattcttttgctctattacgaatattaataccttgatcaacaccttttgaatcaatataatggaaagattttaacattgaaactaaactaacatttgcccttgcatcatcaacaaatctttcactaccatttttaactaaatattctaataattgtaatgatttataaatttgtctccattcatttgctgccttttcagtaaatcttctaaaaatcatattacaaatttcttctctatccttataagtgaaagtaccccttgcaatatctgccattaaagtatttgatgcaccccaaggttcattatttgttgcttctcttactttactctcaatttcagataaatttaaaacagcattttgtgccttacgtacataagacttaacttcccaaagggacaggttcttcattgtcttgtttaaatccatattgatctagtggttgtttacttaaaagaagataatatactctgaagaacaacaaattaaccagccactgccaatgagataattaaaatcaaaatttcaaaaactgattgagattacattacataatacgattataaaggttagatactatagagtttaatacactgaaatgtaattattgatcttatcacgttgattttgtgcaatacattcacagatccatgtaatattacggatttcttgttccttggatttaatatatgcccatactgtagaaaatgtaaattgttgagtaaatgcatccttatttaatctcatttcatattcatagaaaaaatcttcaagacttttaccattttcatcatttgaatttgccgttgattcattgaaaatatctttataaataccaattgaactaattaaaacttgtaaattttctaaatcattaattgatgctaattgatgtttaatattttcatttgatgataataatccaatatttggtaacatttttaatttatcttccgtacttaattctgtatcaagtgaattgatactaatattaatacttctcttatctgcttcaaaattaattattctttccataatttcattacttggagttggtaattcatttttagcaaaattattaaaatcttctaaatattccttataaagaatatttctaataatttcaatatttaaatcatctaaatcatcaattgataaacatgattggaaatattttgctaatggtgtatcaataagtactgtttcatataatgatgttaaatcagttgcaattgttaaagttggtaaagtttcaaaccaacctaatgcattacattttttcaaaatttcacttttatctctattatgaattgtaccactaataattaataaaatattatcaatcatataaccatatttcataaattctaaaaattttgttaatgttgaattactttgacttttaatatatgtgaattcttcaattaatttattatttaatttacgttcaattaatgatgttgaaagtgtttcattaatatctgataatactgaactatattctgttgcacctaattgtaatttaatatcttcaagtgtatcacattgagttaaattaacatattgtgatgaagttaaaagtgtattcttataacctctaacaagaccttcgatatatccattatcgatattgaaaaacaatccctccatatttgtctattgatttgattgtctaaaacagaatacaaaaaaagaactagtgataacaatcatagaagattagaaaaaagcagccaaattttatataccatgttgaaatttcatttcgagactttctttatactgtagtacttattattattattattattataacagaacacttgtagttttataaaggacaaatgtcaacacagcttctattggacaccttggttggtgattcacaggttagtaacttgaactggataaatgatgatgaggggaaatctatggcattgtcagtattggatgaaatgcttaattcacctcatttagaatcattattagatacaacaattacaccaggtatgattgatccaggtaatacaattattgaacaaattgctgaattatctaatgaatcattaatgattgataaagaaattcgcattaagattatgtgggaaggataatagtatgaaagatttaaaattaatgattgatgcaaataatacttatattgaatcatttgaaacattagattcaattatatcatattgtgaagatatgattgaagaaaatccagttaacttcatggattcaaggaaatacctgatttaaataaaaatcaagaatcaaaaaatactagtcataatagtaataatgatgatgatgtatctaagatattagtacaatttagataatgttatacaaatattagaattaccatcaataacgaatacattaattaaatctgcaaattattcagaatgtatagaaatatcatcatttattcaaagattaagtataaggtataatgatttagagattatatcacatataaaggaaaatgtatcatatgagattaacgatatggttaaacgattgtcaaatttattaagtggtaatttaaagcagagttcaattatgaaaataatgtcgtatttgaaaagaattatacctgataaatggaaattaaagacaattttcttaaatttaagatataaatttataattgatgaatttgatactttaataccattgaaaaattcaaaattagttgaaaaatatttgaaaagagttttagaagttttcagagaatttacatttcaaacagttataacatttgaatcaattttcgataaagatacagaaatgattcattcatttataatttcaattgttaattctctaatgaatatacttgatgagaatttaataaacattaaggaggaatcaattgattccactatcttgcaattactctactgttctcaatcccttgcacgtgtaggaggagactttacatccatactacttccatcgtctaccctaatccactcacctagggaacagatactcaccactatgaccaaacagagactaccttgtacgtactcttaatcattaggtaatcgtttataaatcctgtatagcatatagccataaaaagaaaaccttcgctgtgtttattttcacttaaactattatggaaacaattaaggctctgttttctataattaatgtcaccgccccttcctttcagtttcacttctcaggggataatgatacaacctgttccgtcaattgatgtcagcggtgtctccgttaccacttcagagaaacaacaggttcataaaatggataatgaacatttagaacctccacttgaaaaaattaattcaaacgattccggtaattcaactcgttcagtttaccgttgaacatgaatttattaaacctaatgaatatgaaattaatttcccctggaggaaagttggcttcatttattgatccaaatgatgaagttgatgaatctcttttaaaagatttagccttggatgattcatctaaaaaaatttcaacttatatttatgaaaaatattatgcagatttctattggaattgttcattaattatatcttgttgtttcttttcttggttcatctcttttatcggatttggtattttctcttacgttttcgtggctatttgtacatttgcagtttatcgtgctgaatttcgtagatttaatactaatattcgtgatgatttccaaagaattcaatcagttgaaaatttagaaaataaattagaatcaatggaatggttgaataatttcctggcaaaattttggattatttatatgcctgcattatctgatttagttattactaatactaatcaaactttagcaaatgttgaacctccaactccaattaaaaaagtttcattggatgaatttacaatgggtacaaaagctccaaaaattgattcaattcaatcttttactaaattaggtaaagatttatatcaaatggattggaaatttaattttactccaaatgatataagtgatatgactcaaaatgaattaaaaaataaaattgatccaaaagttgctttaggtattaaaattggtaaaggtttcgttggtgcttcattaccaatcttacttgaaaatatgtcaatgattggtaatttaagaattaaaattaaattaggagaagttttccctcatattgatgttttatcagtttgctttatggaacctccaactattgattatgctttaaaacctgtaggtggtaatactttaggtattgatgttatgtcaattattcctggtttatcatcatttgttactaaattaattaattctaatttagaacctctgatgtattaccctaatacaattgatattaaacctgcagatttccttcaacctgaatcagctgctggttgtttatttattaaaattagaggtgttgaatatatttcaaaagataatacaagtaacctttatgttaaatatggtccagaaaatgatttggataaaacttttacaactgatattaaatcaaatacctgttgttcctgtctataatgaaactcaacatactttaattaataatttaaattctaaaatcaaatttgaattatttaatttaattaataatggtgatagtttatcaattggtgaatctttctttgaattacaagatttattacaagatccaagtatggaattaaatgaaagtaaaattattaaaaataataaaaatgttggtaaaattgtttatgatttaaaatggttctcagttttaaaacctgaaactttacctgatggtacattatcatcagaaattccagattcagatgttggtatcttaaatttaaatatcttatcagcaattgatcttgatctcactaaatctttaattggtaaattatcttcattcattgaaatttatctggataatcaattaattcaaacttcaagagttgttaaaggtactaatactcctgaatataatcttcaatttgaacatttaattccaacaaaatcaacatcttttattaaaattgttattaaagatacttcatcgtttgatgaatcaattattgcagaatatcaaggtaaaatactcgatttaattttaggtaatacatcatcagttaatgttaaagatcaacataaaaatgaacaagaaaaaaactttactgaaggtaaaggttcattcaaattttcaattacttggaaaccacttgatagttcaattactaaattaattacaggtaatgaagatacattatcatttacacctccaattggtgcggttaaaattgatttgaaaagttgtaaagatttacctaatttagaaaatttcggtaaaattgatccatatattaaaatttattcaggtggcgaagttaaaggtgttacaagtgttgaagaaaatacaacagatccagttttcaatgatgaatttttcatttcaatctattctaaaaatcaaatgattaaaattgaagttatggataaacaaaagaataaacaagatagacttattggtacgcttgatgttaaattagatgaatttttcaaaaataaagaaaaacaaaacaaaattttcaaatttgataattgtcaattaagtaaaaatagagctaaagcaggtctaattaattaccaaatttcttattacccattattaccaatctattcgcataatgaattacaaatgattgaaatgaagaaaaaggaaattcatgaaaaatctgaagatttagatgaattagaggaacaagctaaatttttagaagattataaaaaacatcctgatgattatgaatgggttgatattgatgaagatgttaaagatgttgtaattgatgataaattagttgtttcattagatgacttaattaaagttaatagtggtgttattggtattaattttatttccggtaaattaaatgaaaaaactgcatttgtacaatttttcattgatgatcataatacatatgactttattacaagaaagagtaaaaatggtaaaattggttcatcatctggacaagttttcgttagagatttaaaacattcaattttaaatatcatgattactaaaacaatggatgttaagcaacaatctgatgttttatatgaaacatcagactcatttaaattgattgaattattaatggcgggttatgataacgcaattgaaattgatttagatggtaataaattgaatgttttatttgaatacgtacctgttattgatcatgaatctaatttatttgatacatttgaagatacaggtttattaaaacttaatctgattggtgctaagaatttattatcagctgatactaatggtaaatctgatcctttcatacttggttatgttgatggtaaaaaagtattcaaaaccaaggtaaaaaagaaaacattaaatccagaatttgatgaaatttttacagttccaattagatcacgtaaacgtcaagaaattgaattaaaagtttacgattgggatatggcaggttcaaatgattatttaggttcaacaattattaaattaaatgataatgaagaagataaagttattgaaagtccattagaaactcaaggttcaattatttataaatatgattttacagttggttatataaaaccaaattcatcagttttaataccaattgaagaagattcaacattatcacaaactatgaatatgctgagctatgcaccaacagttggtgttgatgcagttggtaaggctggtaatttagctggtggtctggcttctaatgccgttggtggtgctacaggtattgtttctggtggtgtgactggtggtatgaataaaatttctgaaattgaaaacggtgcattgaaaaaactaattcataaagatggtgaagatgcaggttttggatcacatttaaaattaaaacctccaggatttttacataaatcaaggaaaagtattgatgaagacagaacattaaagaataaaaaatctatttctactatgaatgatgataatagatcaagacatttaagagttccatcatcaccgggtattaataataataataaaaatacttcatttgatgcacaatctcgtggtagaagttcaattgatgcagtaagtgtaaacactaatgcatttaatggtagcaattcaattactggacgtttaacaattattgaaatgaagggaataacaagtgttgaagatactgttttcattaaagttacaatggtttcatctaatggtacagagaaagttatctttaaaactagaaaatataagattaaggacggacatgttaaatggaatgaaaatgttttattcaaatgtgatacagagggtaaaattgtttttacattagctacacatcatacatttggtaaaggagatgaaattgcaagtggagaaattttactgcgtgatgtaagtggtattagggacaatgttgtaattaatatgaatattggtaatttaattgtcaattttaattatgcttaattgtattatcatgggtatattaaattatttaattatttatatagcaaaaagtctttttttatatttacattagttttgataataaggtacattaatgttaacattatttggagcttaaatttgaatttgtgtttgagaatctactccttaatctacgacgacgaccattgacgataacccatttaggttgttgagaatcggtactagtttcaagaatattcttatgagtgttctccttatgctgattattgttttttaagtcatcacctttagtttcattattagtgtgatgattatgattatgggtatgatgagatatatgctttattttctttgaatcattatgtaattctttattacttgtttcatcgcttgattcagtatcttcaatttcatgatcactattccaaggatcatctatttgtgctttcaaaaattcatcatctatctctgtaacaatatcatgtcccttttgatgattatgatgatttaagttatcttctataatactgttcccctttattataaccggtcttgaatcatgtttacgtgcaattctattatcagcttgtacatcacgaggatgtttagagtaaatatagttatgtaaagccatgatattaacttatcaataagggggtagccctgttatttaattggaatatacattttaaatttatatgctacaaattcatagaataaagtttgtgaaaagttgggagtattaatgcttatatttaactttaattgttaaaggacaatgcaatagcttttaggttgaaatggtgccattgaatataatttctgccgaatgcggaaatcacaccattttgcaaataaaaaatattcatcaaatcattcatcaaatttattatttaggtaatttccatcggatattagctaatcaatttcatcaatttcatttatttcattaatttcaatttcaccgtttagtccactgatggacggttttattgtaatcacgttctccttatcttctagtattaaattaccactcccgctggttgataatggctgtttattaccattattggtattattggaatttagtgttgatgtagaattattattggaatttgaatttgagctgtttgtagccattttatttcgtagtttcagagaatttagtgaattacttttagcattcgtttgtcgtattttgtaaattgaatataatggtgagaatgagtgtgcaaagtatgaatcacgttttatatccagtgatttacagaaacattgaaacattgagtgttttgggacaataaaatttacgcagtaaatcaatcttaaacatttcaatctcttgatttgatatattaaaagtttcatcttcatctccatcttcatcttcttcttcctctgatgttgaaaattgatcattataatcactctcttcctcttcataaatatcatgaagacttttacgttcattagtatgatctgagaaactttcccggcttgaactctcactagctgctttgttgaataaattaaatgttgatggtgttagccttttaatatgttttctctctgctatcacttttttttcttcaataatattaacatcaggtgttaaattcatattatagacacaatttaatgatgatgttgatgggaaattttgaacattattaaaagttcttggtacatctaaataatcatcaaaatctttatcttcatcaaaatctaattcatcatctccgaaaacatcagaaatatcagatgcatcaaaatcgagtctttcaacctctccttgattgtaatcagtagaataatcaattgaattattaccatcaataaaatcacaatcttgttcatcatcactacgtaaatgattttgagaagttacaaatggttgaagtctattaatcttatgtgcatgtgttgatacacttcgttgactgaatattggtttaccagtactatttgatttcctcatttccatagttgatacactcttcattatatgttttaaagctttttgagcattcttgatattatgagaatctgagaatgaaatattagaatttgaaccggatcctgatcctgaatttgatccattcttagcctgtggtgttaaatatcctataaatgataaaagtttttcacattgtaattttagtgaaacaatttcaaattcatggtttttaatctctaattcatatttttgcttcaatacagataattctgcctccctgtatgccttatttaaactattatttcttaaactcgatattcttgaacttgtcgatgaattacgtgacgatactcttttctttttaatgtttaatttcccagtttgggattctccctcataatcaaaatcatcatatccttcctcgtcgtcttcttcacctagattactttgtgatatcaaaaaatcatttgctaattcatcatattcaagttgtagtgattggaatttttcatcaacttctaaatatcttgctctcatcatttctaattcttccataatcatcagctttgattgaacttcaagttcagtttcctttattaatactacatttttctttttcaatttagttatttcagttttagctaactgtaaattctcataaagttgtgagatttgatcatcattgttatcaaaactaagtatgttcccactcacatttaactgtttttcaagtctatgtatcttcagttccaatgttgtcttcaaatctatccaatcttcaaaattctgttcattctcagtacgttcattatttattaaactcagtaatttattattatcatgcattaaatcatttatctttctagttttaaagtcaattaatttatccttctctacaagttctctattaagtgattctaattcagttattagatctttatttatgattgttaaatcttgtatacgttttgcattatcagttgaaattggtgtaatttcattcattggagattgaggtaaaaatgatatacttataggacttgtattctttttcctcggagatgccttaggactcgaatgaatcttgaacggttgcatcttgtccttgattttagagaagaaatcaaataaggaattcacttatttacatattaaaattacatgtaagcattacaaaatctaaccacctaaaaaatctcgttatcctaaaagggtaatatgtaaacaataaaaataatgttggctatttctttaataaagatctattacgtacaagagtacaggtactgatagtgtagacattagcctgtatgggaatggtaactcctctactgtgtagttccagttatgttcagttattgaattttcaaatgtttgtagggtattaatattacgtcgtgttgctgcgagtaaaacacgtttagcaccactttgaacaaaagtttccactaatgatgggataactgaactatcatatgtcacatcagctgctagtatagtatctacttgatggaactggatctgttccccaaaataatgtttggaaaacaacattggcgttatttggtagattaagattataattattttcagctatattaacaacattttcatcaccatctgtaataaagagatgattatttgttaaaaatgatttattcttcattatcattgcaatggaaaccataccagttccacaacctaattctaaaacattacctttaatatcaatattctgtaaatattcactcaatgctaatgcagcttcccatgttctattacctgttgttccaccactagctataactgatggacattctttcatatgaatcaaatcatcacctatagtgtaaatgacggtatcgatagatgtaggagaaagtggtacagatgctatccattcactcaaatattcataatattcatcagatgctgttggccatatgttaagtagtttctgtagaatctgtgaagcataatatgggttagatttcgatattaacactagtttctcaaggaaatcgttttgttcctcctctgtgacatctttcacttcttcaaatggtaatgaatagagttgaactcgttgtaatgcccttgcagtgaagacgtccattgaagaactaagttgaagaatcggcgttaaaaaaatttttgttcacagaatttcggatataaagaggtttagatagagtacttacagtagttatatacaatatacctacaatacttacaatacttaattgctacatttaccccaacatctcaaacgtttgacaccaccatctggaatcataacaagcttgacatgtgtaaatgtatttgcattggaaactgggtaatcatgttcagcatctggaccagttttacttttatcaacaattacttcccaatttgaatcatcgaatgatggatcaacatcactcttaattgcttcaactttaataaattgtgggaaattacctctataatgagcagtatcaatggaaattttttcaattattgcagaatgacctaatctaataattgcccaatcaacatgaccaggagcacgagatctctttgtttcccaaccatctgacatatcatgaccacgacctggtaataataaattatcagctgaaccaaaatgttgatcagagaatgaagttgcaacaccaccattaatagcacttgctaaatcaattatagtatttgaatcatttggtaaaattggtataacttcaccatataatctaaatctagcaataccaccatctgggtacatctttaatctaatatttgtataagcatccttggtaatttcatcacgaataaagaaatgtttttgtgatggaccacattccatctttggaataatttcaacccattcaccatcttcaccaattgatgcatcaactgaaatatgaggtgcatgattaccattgaaaaatgctgtatcaacttcacaaccaataagttttgcagatgaaactcccatacgaaaggtaacccaatcatattcttcagtattatgtctacgagtttcccatccatcataccaagcacctgcaaacacaaatttagttgcatctctaattggtgcctttggtttaattaaattctctgcagctgcaaaccattcatcactgaatgataaaactttaccaccaagcttttcaccaataacatcagtgtaatgacttacaactttttcatgaaattcctctgcacttacttgtttaaccatttcgttatccaatgaagcagatcaaaagaaaaccatcatataaacccacaactggcagatttattcacttttatattcacccagtaaagaaaccgttaataccacacaacccactcggcggcccgaaagttttcacgggtttccccgataacaacttttacaatcttggctttttactctacttaatgtctacttttctataaagaatctctgtatctgtctctcattaaggtcaacatctctctctacgtagatgatctcgtcttgatcagtaaccattaccagtgtttgtgttcttgttccataccctggtccgttttcattaactaatgctggaacaaaaatggtttcctgtacagtatttgaaccatttccatctaaaacactatacaattcaccaccttcaatagtttgatgtgataaaatatcaattagtgcattaatcaactcattttcattaggtactacaccattacatttatcagcataatcagttagtaatttttcacccagtttaacctttggccacggattcataactgctgagttggataatccaacagatttcctaccatctttaaatggatcatataatccttcatgtctattagagaatatgaacatattagtatcctttgataaatctccaacaatcagtgaaaatccaccgacatctttaaaattattagtttttttcttttcaccttcaatccatgtaactatatcatcattgttttcattaaataagaaatcaactggtattgcacctcttgatactaatccactaaatggaccattctccctgtaattaactaatacacaaaaacgtcctcttctagtaataccaatccatgtaccgtttcgtactaaatctctaggcatcaaaactttatcatcgacaaattgtgcttttgccgtaggtcgactaaggaattcgtccctatttgatgccagaactaatttgtagcctggtatacttttagtgcataacaaaatacacattccggaatgctaaatagtattatatttacagtaataatgatataaatgaataaagaagttgtctataaaatgactcctaaatgtgaaatttgaaaaaaaaatgtggggttgaaaaaccactcatgaagacttcaccaaataactctttcaacgacttcagaaccatatttgaaagtatacttcaagaatgaaatatagataaactgtgtccacatccataaccatattccttcacctgtatatctgatttcagtgttgtaggtatgtaatatattaattggtaaaactggttcactaatagtggaaacaaataatctgaaaaaaatcattggcacaatgtaatatctcaaatcaaacattggtgttaacataactgaaatacttaaacaaatcataaaactgtagaaaatcaatggtgatgcagctgtacgtttgtttggtgtattgttatcataattattcttgaataatttccaaataatgtaaaatgaaaaatgataaactggtattaattgtaatcttgccttttcctccctgacaattaataatctgataaagtaaaatacataatgacgattatctgataacattgatggatggataattgtgaagttttcaataactatgtataaaattggaatccaagcagcattaaacattaatccactaattgaaaataaattatcattgacatagtcaacaaaagttcttgaagatatccaaattggaatagtaaatatcattataaatgtaacacagtaacaaatttgtgccaaatgaggaacaattatttgattttccttatcacctaaagcaactccgccattttgatatacaaatgtgaaaaatgcaacaccaacaatgataaatgggattaaagtagttagatttgctaatccagtcttgataaatgtaagggtatcaccgataccttctccatatttatatttctttccatctttaacaattgaatcgataataacagcacccataaagaaaacccaaacaatattgctttgcttgaatgtaactgataaggatcctaaaattgcagacattattgcacttaaaatataactatttttcggtttccaaacaataactgcatatgctgcaactataaatacagatgcccatacatctgggtagaataatgagtagtaaattgcaattaatgggttcagtaaaatggatactgccgagaatcccgcctctttattcttaaatctgattaacatcaccaacattgccaataaaactccacctaagaaattgcaatatctcatattagacaacgttatttcagaattggaaatcttagcatataataaacttaaatagtataatcctggtggagttgaaatttgatcattccatgttgtataatcaccacttgcaattgtttttaattgtgggaaatgtaatttttcatccataactgggtttttaacatcattggaaacatcttcaacaaattgacgtaatggcaatgttgcaattcctgcaactacggtatctaaaagtgtttctgcaaacattgtctaagaaaaatgggaagaaaactgccattagaaacttagaaaaagacatcaacatgatttatacgtgtagactaaaataattttatttgacggaagaatgcatgcttcaaatcacttttttccgtcttttaaatgaacaatccaaaccaataatgatattgtccttctggttactcttctggtacttctgttccacaggatgtgccattactataactgcagaaaattctgaagtttgggatgaatttaccaagtactctcagcttaaatcctggccttatttatcaagagctagagccgctgcaataaggacacaaagggatgttacagctaatgtttcagttacctacagtgtgactccaggagttgatttaacaccagtggtttttgaaagtctgggttataatgcagattcattgaatgatttccgaacattattaaatgttggtgttcagacatttatcttagatttatactatcatgaaaattcaaaagcttggcttttatgtccacctgaaagacttgaaagtataattggaggtggttatacatctgattacgacttcactgaatgtgatgctgcaacatttaatcttacgtcccttataagtacactgaataattttctgagtaatacaaacaacaacttaaatacaaatgtcatgtttttattattgaaactacattccttttcaacagcgccaaatgttacaatgccagcgtccttggtaaacaccaatgttacttcattatcagctcaattcgatactatcgataagattgtttcaccactcaccgttcctagttttaatcttccaacaatgaacgatcttttattccgtttaggtttacgtgttttccctattattttagaaaataatttgtatgataacacatcatataacttacttgacgatcaatttacattttacatatcgttgagaccagaaaagacggatcaatgggattcatataatatcctggatatggatgtttaccatattgatgaatttgaaaatgcaacaactataccacttagaactcaacatcttgcatttgcatatgatacttcagcaagacctttttcactgaaaagttatagaaaaagtatatcgcttggttatggaccaataatatcacatgcgttagataacctctctgatatctcatggtttttggaactgtcgtgttggtcatggtccccgtatcagccaacaagtacggatattgatgaattacaaattccacaaatagtttcaaacatttcagattatattttaaatgcaccattcacagggcgcatatttcaacatagcgatatgtttgacaattcatcactgaactttatagatagtggcgctaacaataatactgatgacaacactaacgaaaacaacgatgataataatgaagacgatgaatatttaaacagatgtgcagcattatctaaaatcggatggattgcaacaacatgtgatcgtaaattaccggttgtttgtcaaaacttgagaaatgcatcagatttcatgctactcgatgttgaaatggattatatgcgtgcagtatctgcatgtaaggcgatggatggaagatatgatattggtgtaccgagaaatgtttatgatcaaataacggcaatgaatttaataccggaagataaagaatttgtttggattaatttgaactctttagctagtgaaaattgttgggtggtaggtttgaataccaattgtccgtatcaattagttacatctactcatgtttttgtcaaaatgattacaccaagtactacaatggccgtagctttagcagtagctctgatcattcttcaatcccagagagtacctgttcataaaaatagaagagcttggaagcgtaggatcgatgaattttcaaaaaacgatattgatggtgttccagcttgaagagagagggagggatagtaagcttataaaaagaaatatatacccataaaactatctaattgtatctatggatttatctacaccttctgtagcttcgattatttcactaccgtaaatacctttttcataaactcccattttcatatccaattttgaattccaaacatcataaattctaacactttgatcacttattgatgtacagattgaactgaaatcatttgatatatcagctgttaaaattctcatatctggtggtgcagtgactttaatttttaacttcattgatgggtatgaataaactgataaaatatcatttttttcattatgatcaccaaatccaaaagttactaaaatttccttcttggatcttgaccaaataacagctgtgatttgtcctttagttttaaatttactaatcaatgttcctgattttgaatgccaaaatcttatatgcttatcacgacttccgcctccagtggctaataagttaggcatccatggacaaaatgcaactgctttaactgctgcttcatgttttaaatgaaacatttttttaggtttcaacatatcagaaatatcccaaatgctaccacaattattgttagcacctattgctagctgttttcccttgaagtcaacatcaataccacatatttgttgttgatcgcattgaaatgtaactttaggtttgatagaataaacagttttggtaatcttagtctttgatggacctttatattttatatcttctcttgatgataatttaaataatgtaacttgaccaacatcatttcctataaagaaaaaatgcgtattaggtatccatttcattgaacaaatgctggaatcatttttcattgaatatttagcaataactgtcgccgtatccggtttgtagataaacacatcacttacctttgtaccaactgccaaaaaatcatcactactaaaacacaaagcagatataatttgtgatccaatatgttgtaatggaattgtacctcttttttcactccaacaataaactgtgcttcctaatccagcagctattatatctgatttatttgaccagcaaactaaatttgagtaaaagtcgttccttaaacctggtgcatcgagaactttaaatggaatttcaggtacacaagtctttttggaagatactgggaaattatcattaaactttgaatcaaaatcttctgatccgcttttattattacatgaaaaactatgttcactatcattcatgtgagagtaaaatggttttatctttgtggggcttctaaaaggtttaaagtttaatattttagttgaaacgatacccaaagctttggcaacagttgtttgatgatcagaacttgaatcgattgtatcagtattactcactcgattactcgtattactatttgcattatctattaaatcagtcagactggtattattatcatccacatcatcactatcaaaattaaggttatttgaacttattgatgagagatgatcaaaatcgctaatagatagttgcatccggttatagtcaattgttgtaacaattggaatgtttgttctaacgggtgaccccgatggacttttcaacgaccgatcgtgataattgtacatttttttctcggaacttgcatttattgcaggtatatacctgtcatttactgcaccatatgtagatgtgttgtttgataatatagtttcagctgagaaacgatttcgtgacttttgacaattttgtcttttagtcttgtggtgatgcctagttgatgacattaaaaaatttgtattaaactatataaaaaaaactgttattagcaaagaaagaggggagaggaaataatctggctatttaacgtatactgtagatgtatcctctacacaggttgttaaatagaagatgaaacaaagtggattaaggattagggattaaggaaaatgcatgaatgctaccaacttcggagttgccttaataggggaacgagaaaactccgaaaaaaaaaatctttccaattttcttcaatttcttttaaacgatgaaactttcttcatggaaactgaaaccacaatcattggcccataatctgacattatcaacaagacctgaaggacctgcaccaataacgtaaatttcttcatctggttcaccattattattttgaaatctcgcttctctgttggctataaacctatcatcagaatataattcagtaacttgaccatcatctaccagataagaaattgtttcaccacttttaagagtaattagtggacatttacatgatgagccaatacaccaactataataatacagacctaaaactggtctaccaaattcaattcttgagtttgagtttttcaaaacccaataatcttctaaatcatcgtataatgcagatgatgcaattgttggagcatatgaacctaaaagtttttgattaatcgtcgataatcctgaaagtttcttagattgtgtccttaaaggtgcagattttggttgaatatcaggttcgataattgtaacgttcaagttttgaggttctgaaactgtatgtcttggtgatctactgattataggaactgggttttgattttcatcaaaaactatatcattatttccataatgagtttcaacaccggcggaaggacctgatgcattctgtttaggaatagttggatgtgattttttataaatttcatcttcatgtaattcgatatcaatagtttctgtataatatgaatttgatgatgctttacctgaatctcttaattgaacaagactttttttatgttttgggtataatttagaatcatctaaagttgaagatccataagtaacattcatattattcgaattattaagtggggttgattcatctgtactagctgagttaaatttgaatgtcgttgttggagatagggaattattgcttgaagatacatcaaatgaatctttatcatcactgtgattattattattatatgaaaaattaccacttaaaatttccatttcatgttttaattccagttctcgtttcctagaatgtaattcattcaatgcatctctaaaattagctttttcagaaatagtataatgacctgtaatgaaaatatcgatacaatcatcattaactaaatactttttaaaataatctaaaatttttaaatcatcatgatctctaataacccaaataattttgaccattgaaccattataatttaaaactcttaaaataggtaaagcaaaactgattgcagagccacctactacaatcaaacattttttcacttttgtattcactgataatgggttgttactatttaataaattactcattgataaatggttaccattattattattgtgactaatttttttgataaatgataagtgaggcatgtatgaacccgttatcaaatattttgaattatttttaaatttataattaccaactctaataattaatttttgtgatttatcaacagataatgttgcaagggtataaggatgttgaattggaaaaattaagtaccataggtaatttaaaaatttaggataatttatcgttataatcaataattcttaaatgacaaccaggtaaagtatttttttcaaccaatgaatcgtttggtaaatccaaaataatcatattttttgaaattttaatagttgatattgttgaaactgatgatattttaaatttataataaatctgatataacaaaatgagacagtttaaagttgttaaatatggaatacctggtctaacatgtaaatataaagtaagtgtaacaatccaagtacaaatataatgattaataaagaatattttgtaaaaagttcttctaatataaggtaatgaagtaagaactatgatgatgaaagctgtcattgcaataataccatttaaattatcaaatctgtgtaacttgaaaagagtttcatttttactcatgatgtaaatataaagtaatgtatgtaaaagactttgtaacacgaccaatcttgataaccatttatgaattggtaatagagataagtataaaacatcgggtaatggtgaaggtcttaaagttaatatcaatactgttggcaaacaataaactggtactctacctaatcttgcagcaatgaatcttatatcaccattagtttgagcaattgataatattgagagtataattgaccaaaaaattatcatttgagttgacattggattccaacgtaacagttgtgtttcaggattttgtttgatccatttattaaatttaaggaatttataataaatataatttgatattctattccattttggtaatatcaataagaatataatggtaattatgaaagttacataaccataaaagacagttatttcacgtctattaattttccatgatggtgaaaaaatctcaattatcatatttaaagttgaacctatattggagtcggaattcaagtcgggatcaagtgggatattattcccattattggtatcgatatgcatttgatttattggttatttaataacaaagctgaaagaaagatacgaggtgtattagaaaatgaagtatacgtgaaataaatcaagaatttaaaaaatggatatgaaacgaaattataacaaatatataccaaggaattggctataagagttgatgagatagtactaattaatgacaattagtaataatattatgtacctttgaattaaatttacaaaagatatattgttctaactgatggttaaagagccgtgtatctataggatacaattgatcataaacaatcctgtaaaacccaaattatttcaatgatataacctcaggtggataaaaagtcagacttgcccgttaccgatatctccaaattgaaaaaattaaaaaattgaaaattgaaaattgaaaacgtttttgtcacgtgtattccactgggtctctctaattttcatggccagcccttattgcctcatagggcaccttacgtaatagcacaaaaataaaattcatcaaaagccaggaacattgaaaaattccacaaaaacggggaaaatctcccacccgcgcgtctccttcccaaaagagccaccccctcagaccgcgcagttgcaaattttttggaatttttcataatctttacactgtgagttgtacggtattgcaaatcattggtatgggaatactagtgaaaattattttcaatttcaaattattgtcaaaataactgatattttactcaatttttattgattaatttttggaaatcttttaattttataaggcaaacaggatatatctatcaccacactcatcatggctgacttctccttaactcaacaagatttacaactcttgattgctgctaatgcacatcttggttcaaagaacactaacgtatgtacctaaattaatatgaaataattaagaaaaaatttaaaatcattcattaaaatgatataaatggtctatatttgatatatgatatatgatatatttgataaattatgaaatgaattattaattgataaattacactgtcaagggacgattattatattatcaaaaaaaaatgaagattatatctgaaatagcatttataatacaatcaatcataatttaatcatctttagtcattaatatcataatattaagaaatagattataagttatatcatcaaagaaaaactttacatgaattgaaatactaacattaaaactctttattttactttttacttttattataggttcaccaaactgcatacgtctacaaaaccagaccagatggtgttaacatcattaacgtcaacaaaacctgggaaaaaattgttttagctgcaagagttattgctgctatcccaaacccatctgatgttgttgcaatctcttcaagaactttaggtcaaagagctgttttaaaattcgcttcccatactggtgcaaccgctgttgcaggtagatttcactccaggttctttcaccaattatagtactaaatctttcaaagaaccaagattaattattgttactgatccaagaactgatgcacaagcaattaaagaatcttcttatgttaatattccagttattgctttatgtgatgttgattcaccagctgatttcgttgatgttgcaattccatgtaacaacaaaggtaaacactcaattggtttaatttggtggttattagcaagagaagtccttagattaagaggtactcttgcaaacagaactgaagaatggtcaattatgccagatctttacttctacagagatccagaggagccaactgttgaagcaactgaagaagaaactactgaagttgcagaagaagctgaaccagctgctgaatggaccgctgaaggtgatgctcaagattgggctgaagaaggtgctgattccaaggattgggctgctgaaggtgctgaagctgctccatcatggtaagtttgtaaatttttctacaagttataactaaatttgtataaactcttcatttttcaaagtattatatctttataaaaatattaatcataaattaaaaaatttaaattttatcctattaatattaccttcttcctcttttttatctaatgtattcttggatatatacatgacaagttggtatataccctttttatcaagacacggtggttacttgattgctgcattggcatatttttactataataattattatcaacataatttatctccagccacatcacctgaatcaagtttattttttagattattacttggcactttttgtttatcaataccatactacgaattgtgtcaattaatcaataccttatttaaatacagcttaccggaagatcgattacaattaccaacattagaagtacatagaagagattcaataactatcgatcacaacacttatgaatcataataattataataataagaacaatcaaatttcaaaatctaaaaacaatataattttttggccaaatgatataaaacttaataatgcttcagagagatatctgatattgggttatagaattgatcaattcaccgtggttgtcattgatatcattgtaaaggaggactatcgtgaaattagtaataaaactgacaaggacatttttcgtaatattgaaattttaacaagtatcaattgcaaaataaggaagtgtcatcaacattctcataatcatttatatgaagcttcaatatgattttgtgaagaatcaaccaatactaaacaataatcaaacaattatattttttaaaccaccaaattcatcaaatttagaatacttttcattagaccctatcaaaattaatattttttggaacaataataatcaaattggtgaactcattttcagacgaccatcaaccaggaaatatgctgataagctattgaagcatttttctaattttgataatgatgatgatgataatttgtcacttattggtgaaaattcaagggaaattctacgaataataaatttgactaattatatcagagttagaattaatgcaaacagattaaacaggggtaatatcttcaacatctttaatcgttgtataccttattatgaagtgatgtttaccttagtagcaatgttctattacattttcattcagaaaacgtgttatttattaagttcaatactgacataccccgttttaaaattaaacttcaaatataaagtattcaaatgatggaaaatcaaccgataagaacaaaacaaacatatctttaagctcgttatcattcatgattcatcaaataaacttcagagctaaacaactttacaatttaccattacaattcaagaaattaagatatagcaaacttgagagtgaagcttcaatcataaaggacgcaaaattttcccctagtgaatatatcaagttttacaatacagtttggttgattatgaatgatttattactgggtgttgtgttcacaacaatattgaaaaaccaccatcacactatattaagagtttttgaaaaaattgtggtggaatatcatgtattgttaagtaataccattacatggttgatgaattcacctgcaggtttcaaattaaataatgaacttgcatcattcatggggcaattaattctttgggtgcttgacttctggaaacaaaatattttgaagttcctgattttaaattctgataatatattgatcacaatagagattttttcacaatattttggactctctataggaatttcaatgatattagatttgttcaacatattcatcttgagtataaatggcttttacattgcatcaactagaatatattgttggcaactgaatattcttagatcattattcaaattattttacgggaaaaaatataatgttttaagaaatcgtgtagattcaaaagattacgagtttgatcaattgatgcttgggatcatcattttcacaattttaatttatttattgccaactgttttcatattctatcttacattcatcatagcaagacttacaattctgatactcaattttactctcaaattactactcatatcattgaatcacttaccaattgtggcattccttttaaaattgaagaatcaagatagattgcctggtggtattgtacttgattgtgaattttatactaatgattatagaattacacttcattcaaaatcattatcaatcggtgaaattgtaacatcacacatcaactcgatgttaaatttcaataagttcaatcttaatgctcaagatactaaatcctttgttgaaaatcttagagctgataaaatcagtgagttatatactattgacgatgttgttaataattgggatagaatttcaattgtgactattgtgaaaaatgtagtgataggtgagataatcaaagattacgattacaaggaaatgttttaaataggttctttttgtatttggttctatatagacgactatattcattattcacagttaatttatatacatggcgatcatttcttcttcttctttgcagcactaggagcttctctaatcttctttggagaacctttacctcttctcttaagatcttcaactctctctgcacggtattgttctggttcattaataacatcgtagaatggtgtagataatgcctttgctgcctttgcaatggatgggaagtcagatggtccgtaatagttacctaatgtttgacccttaagtggagctgtaaggatttttgaacctgttctcattttagttgggttgaaagttgttctgaaaactctgctttgaatttcttggagttccaaaagcttttgcttggatggcggtacaagtttagtcaataccttagcaactgtggacatgtttggctctgtaaatcaactatattgaaaggaaagtacgatccatcctaaggttgaattctcgagatttggaaaatcatttttttttactgcaacatgttttttcatgctgacacattaataaacggtttctcttcaactgttccttctatttttattctataaaagacatatatagatcataccaaccattatattttcagattagatagtatgatatcatgaaggttaatgaagatgttttacaaatggcatcatttgttaacgatttgacaaatttcataccattgggtgtatgttttgcacttcatgataagtgttttgaaggaccaggatgttcatcccctgatggcgatggatggaaatggcttgatttcccatatattgaaattgatggtacttcagaaatttttaaagctttgagatttatggtaagaagagtgctttgtcgatttacttatttaattcttagatgattttcctgggattgcattaatcagagtttacgttcttcccgaagatagttactataaagaacaaattgagttgtataggaaacgttattttacattcaaaaagccttctgcgtggttagagaaacaggctaagatgctcatgggtaatttgtattccctgatggattactagcaatgaagctttcaatattcaaaattcagatcaattgaaaacttatttagagtctaacagtactgtgatattaaaaatgttttctaatactcagccattgacgaacatatcttctggaagtatgaatttccatctaaacaggttggtgagtaaaaaaccatacgaacattataaagagcagaaatctcttaacatgcaagaaagattgaaaaatgtttatgctaatataaaatcacctcaaaatatacgctccaatgttatcaatgaagatgatcttgatatatacgacatgatcaataataatgaaatatcagggtttaaaagtgaattgtataattttccaaaaaagatcagttctgaaaatgtttgaaagagaattgtcacaatcatttatattgatgccaaatattgttgaagtgaaaaatcatgaaaccacttattatatcaacacaactacattactgccacaagtaaacccggtaacttatttgccacctaggggtgggatattagcagagaatatgggttttggtaaaacttgtatttgtttggcgttgatatgtatctctagatttcaaatatcagaaactccgtatgactataaaagcaaaagaaattcaaatagaaagatgaagtctttgtttgacacttgcatagatttcatctccactaactccatcccgtggaaacaatactatgatgattttcctcctcgtatcacggcaaaactggaattggttgcaggttattttgagaaagctgaaattaaaccaaaacaaggaagagctacaagattcaacaatagcaatcaaaatacttccactgaaaaaattatacttatcatcttccacgttggttgttttacctgataatctattttatcaatggagagttgaaattataaaacatgttgagaaagattttttatcagtgcttgctatacaaaatacaatctcaaatgaatgaaataaaaggtattaatgaaattttgaataaggatcttgttttgatttctaatggtgcattttctaaacaatatgatacttcagactcaataattaaatcaatctactggaaaagattgattattgatgaagggcattcaatgaattctaaaatttcaagagctgttttattaacaaaaggactgatgtatgaaagaatgtggattataagtgggacacctacatcaggcttaacaaatttacatcttgaaaccgaagcatcaaatccaaatgacgatcaggatttagagtattctatccaaaccaaatttgatcctaaaaaagacttgagtaatttaggaatgatagtaaagaatttctttaagataagtccatggagctcgaatgatagattgtggactgaatcaattataaagccatttgaacgtgatgagtttatgatagagtatcaactcttaaacctgttagaacgacttatggtacggcacacaatatctgatgtggaaaatgacattaagttaccaaaactacatcataagcctatttttttgaagccctcattttatgataaattatcaattaacttatttatatccgttcttgcaactaatgcaattacttcagaaagaaagggtgttgattatatgtttgatcctgtaaataagtcagatctcaagcgtttagtaactaatttacaaaagggtacattttattggactggttttagtatcagcgatgttgaaaatgttttgaatatttgtgtttattctttaagggaaaataaatcaagatactctgcggaagatatcaaaattttaaatcaatccatctttgtttgcaagctggcattatcaaacctgagatggagatctgtttcagcagttcatgagatgggatattttgttaagaatctacctagttcaatagttaaaagttattcactgataagctatgaaggagatatatcagtttttggatatcctcatttgatatcgattcaaaaaaattattacaaaaacagaattataaaaaactcagatgatttgaatagtaaatttctgagtgatgttgataagttttggaatagttattggaaaaatatcaaaactgctaaaaagactgaaggtaataaaaggaaaattgcagaagattataaagaatttgaactttctgatgtcaaatctatttttgaaactgcgaaatgggtggatacattcaatccaaaacttgaagaaagccttatatatgaaaatgattcaactgaacctgttacatccatgctggtggatactcattttgttgaacaaatcgataatgaaaattttagaactattggatcaaaaatgagaaatgcatcaattgttggaactttatcatctaaactaaattatttaactatgagattactggagaatgaaacaaacggtttgaaaagtatagtgttttatgaatttgaaaattcggcatattatttaactgaactgatggatttgcttggtatgaattatttgatgtattcttcttatgtcaaaatcatggatagatccaatcatttagcacaatttgatagatgggatccaattaaaaatgaaggtgaagggattacattaataatggacgttaaacttgcatcccatggtttgactattattgcagcaacgcatgtttttttcattaatcctgtttggaatcaatcagttgaagctcaagctatcaaaagatcacatagaattggacaaatgaatggagtttttgttgaaacgcttattttagaaaatacattagaagaaagaatgtataatatgagaaatttaaatagtgattctgataaagttgatctaattgatcataaagatattaaagattattttttgacgtttccatttctaagaatattcaaagattctaaaatagatgagtattctgcatttgaggtgccgactatctttcaaaatgaatttaataagaaaaaaataagttcaaaagaaagtgatgatggtgttaagctaaggaagattgattcagtttataactcaaatgatggtacaagaagttgggatttacccttattttctgaaaagaatttagaaaagcttgctaataatgaaaatataaggaagagaaaacggtttgatgatatagaagaaattcaaaatgagtataatactattgataatgataaagatacagttattctcttggaaaagttgagaaataaacgtgttcatagacatagagtaaaatttgatgtttaaataatggaatctataattttatagtattagatcaagttaaaaataatacagtaatttaatcaaaataaagaatggaaaatagatatctcccacgacacatttttatgtcatacttgcaaatcaaatagttatctaataagttctctccagctttaagtattgtaaatcatgtgtatttttgtctattaaacaagaaaccattaattatttctactcttgttacagttattgcaataatattagtttattgtagtatttaaaccttaaaaaaggtaaacctgttttcttgctgagcctccaataaagtaaaattctttcaatttcagataatgaacatgaaatcaaattgaaaaacatcagttagtaataatccttaaatgttgttaatttttaaaataaatgcaaaaagtactgaatacaagtaacatagattaaagtctattaattatttttatacataaaagaaaatataatatagtgtacataggaaagatttaatacttatttttctttacctgtcgataaatcccttaagatgacagatccgtctgctgaacaggttactaactggctatttattcagaataatctaaatcgaatacagttgataaatgaccatctaatttatttattaattttcttgaagcaaattcccaaacataggtatatccatcattagaacctgataaaacattaaataaatcaggattcatcatcatcatttgttggatcttgtattattatcgatctaattaaccagtcatcatctgaggccgatgtaccatcaaaaacataaggctttgcacgtcgccttgtagttgttttttctgaaagtattttagcatcaaaatatttaattgtcccatcaatcgacttacttcaacaaatatgattcatcaggtgataaatgataatgatgtgacgttattagtatgtgaattagattctgaccatgaaacaactggtgattttgcattacgaatatcgtaacaatatactgtcgggtctatacctgcaaaatatattctatttgaatttctatcaatacaacacgtcaatacaggcgtatcaatattaagaggtgtatttatctcagaaatagggaattttgatctaacatcccataaccttaccttcccatcatcacaacatgttacaattgtatcattttcagataaagacaattgattgacagattccttatgatggaaagttttcactttagttgatttattaagatcataaataattgctgtatgatcagcagaagatatgaaaacatgtgaatcttctaaatttgaccatctcaaactagttatagcagaatttgtaaccctttcttcatagacaccattatctaaatcatcattactattttcctccgcttcatcttcattatcagccaattgatctacattccatattcttaaacatttgtctacaccaccagatgcaaaatatgaaccatcttcattaaacctaattgcatagataggtccagaatttgtatccaatcgtaaatcacctgtagctgacatcgaaaccaacgtatcttcctatattctcaatcaaaacaaacttacagttgtcttatcctgtaaaagatcgaattcatgttgacaaaaattacccaattgggaaatctgccaattaaagggacgggtaccccataaatattttctaattgcgagggtggcaataattgaaatcggaagatgacatgaataggagtgggtagcatcaagaagggaaggttttgtattatattattttactttcaattaccatattcacaaatcaattacacaatgtttgctagaagagctttaactgcagtcccaagaagaattgtccaagtcagatcatactctgaaggtgcaactggttcaaccagatctgatggttcatccgattcattcactaagagagaaaaggctcaagaagatttctacatcaagaaacaccaagctgaacaaattgctgctttaaaggaacaattagcaaagcaaaaggaacaattagaaaacttagaaaaaaatctgaacaaataaatttgatgtaaattttcaatttaaatttataatcaaatcaaattcaattccttattctaatcttaattcctatgcacgaaaacatttatttatttattccaattctaacttatatactcgattatttgcatattcatcatatgtcaattaactttttttttgtataattgagtgttttaataacgatttaacttatttattttaaaattttgatgatgtattaaacaattggaaaatattttacagtaaagtaaggaaatgtagatattatattagtgataatattatgtaggtaactaactacttatattatacatacgatgacagaataattttaattaacctaatttaaacgaggtcttttaacattgtctaataaagcactttcttcatcaattgcagggaccttcagttgcaccaatttgaggagttgaaacatctgcatgataatctttaataattgaatcaacatcatcaatatttaaaggtctaatatcacctaattttttaattttaccagtaacttccttaatttgatcatcagttaattgtaaatttaattgttcaactctagctttgattgcattccaaccagttaatctattagcaaaatgaatatatcttgttaaaccaaaatctgctggacttaaaatttcataagttgaaggatttgctaaaattgcctttgcatgaatacctgctttatgagtgaaagcacaaaaacctgtaattggattattaaaatggaatattaacttgaacagcttcagcaaccagattttctaaatctcttaatttatgtaatttatatttacctaaaacatattctctatcagctgcaatcattctagccattaaaccacctaatggagtaataccatttctttcaccaatacctaaaactgagacatcaattaattttgcaccagcttctaaagcagtataagaattagcaattgcacaaccagtatcattatggaaatgacattcaatatcacatgaaacaactgattttaaagttttaactaattcataaacttgtcttggatttgcacaaccaacagtatctgcaataccaactctattaacaccaattttatcaacagttttataaatatttaataaatcaactatatcacttctaaaagaatcttcacttgaaaatctaatttcaatacctttacttttaacaaattcaataacttcaattgcatttttagtaatataagtcatatctttaccatgagaatattgtcttaaaaattgggaagtaccaataacgacatcaacaccatcaacaccagtttcaactgcaactcttgcatcatccatatgacatctaatatgagttaaaatttttgcctttaaacctaatttacaaattgcttcacaatcagctcttgattgttctgaagcaacaggtgaagttaattcaatataatcaacaccaaaatcatctaatgcttttgcaatttcaattttcttttcagttgtaaagaaagcatttgcgaattgttcaccttctcttaaagttgattcaattaattgaaatgaacgaacatttgaaagataatcacttggatttggaccatatggattaacttgaacttttttatgttgttcttcagaaactttttgataatcgttcatatcggatgacatggcttgtatttaattttatagattgatctaatgtgtcaaagaaagaaatactaaaatcgaaaagaaggatattacaaatacttagtcatgtaagtgcatggcagtggtaataaatattttttcattcgtctgagataacagaaattgtaattgtgtgatggaggagagtcatagaaaaaattcactgtgcggaagggagattagtcactgttctattttaatttgtataggggagatacacaatatgtattacactctcgtattatacgttattatatagggtatgcagatatggatattagtccataccgtagtgtttagtactaaataaaatactgtaaaaaaattggttttttcttttgataaaatcacctcttcctaatattttttttaatttacaaatgatgtttgttaaacttaaattgaactaataaaatgcactataaatgtgattcaaattttacaaaaacaataatataacactggaagagactacaataaccaattaacctacatcaattagctcaattaagcaaatagtttacttaaatgaatcaatatattcccaaccacaacaatttcaatgtcgtgcctgataaactcaatttcacaaacttttacattgattttgctttgtttttttcattgcaacaagtatttatcattattatgttttaaaacctttaaaattatacaaaaatctacgaaaggtaattataaccagtactttcatcatctctagcaagatattgttcatctaataaaacttcaattcgcactcttaatttcactaacagttggtttaaatctatcaattatttgataaacttctgttattaaattttcatgtcttaaatgttttctagctttcattattctaacaataccagctttaagtatttcatgtttacgtctttcaatttcttcatttgtttccttttcttcattacgtgtctcaactggtttaacagttgaaaaattaacttttatctttttcgatgtatattcttttaccattgtaaaagttgtacttgatttgagtatatttttttcaccaggtggattttgtataattaatttattctttataaatgggatcatattttgtttgaaaacttcagcaggtaatgcagttttctctaataatattgaagtagttaaaatatcttcttcttggaaacatgataaaattgcatattgaaataatgaaactgtaaactaaatatggtggtttaccaggttttgaaatattagccttaacttcaattttagatctttcccatatccaatttaattgtctaccattatgtctctctttataaagttttgtaaataattcttcacttaaaactaattcctctggcagaataaatgaatcattattatttctgaaaattgaaccccatgatgctgtatctaaaatttttggttctaattcgaacaactgaatctttattaacatcagtaattaaatctttataaattactcctaaatttttagaaattctaatatcattaaacatatttgtaattttatttgtatattcaacactatttgcagttttcaatctttgaataattaattcttcattttcaccagtcttcagcagataaattattaaataataatcttttagataaacatcttctataccaaatttcaaaactttccttatcttctaaaaatttgaaaaacttgtaataatttcttcaatattcatattattaaaattatcattatctataatgttattattagtatttactgatgtatttatattattatttttaccctttaaaaattcatcacaatatttagcctaaatattcaggagttcttggtcttgatctattagttggagttgaaacaacattataattaatgaatttttgacatgcactatctaaagctttaataaaatgctggattattatcaaatgaaacttcaacaacacctttaaatttagttataaattttcaataatgatttaatataattattcggatcaataatatcttgaggtttcttaattttcactttagtttttgaattagcagcaacatttaaactttcaatataagcttcatttgcagttttgaaaattttcatcagataattttttaaattgtataatttcttgagcaccttcattttcaatatatttttggaaaatttctaataataagtggtaaagttgaaggaactctcttaagtaaagtattaatttttttaatatcgagataacgttcttgatttaataaagttggtaattcatttctaatttgatcttgatgagttttaatcaagacattatttaaaacatcattaagtggtttccttgtatgatcattcaaatcttctaagtttttcagttcttcatcaattctatctaatgctttattaacataatttacaacaccattttcattaataaatttagcagactcaattgcataaaaattatgagtatcagttaaaaatcttttctcaaaatcattaatataaactgataaattttgttttcttaaatcatttgcatcaaatcctaatagtacaaatgatttaattgcaatatttaattgtttaattgaactattaacaccttgtcgatgtaattgaatttgttccattatttcatccattaaaatattcaaatttggataaaatttataatctctccaagataataaacataaactgaaaatatcataaacatcacgatgcccacttgatctttcctttgtaacccaatatctatttaaataatccataacatcattcaatcgtttagatcctattaaatatcttttccatgatctatataataatcaacaaatgattcattatctcttggtttactatttaagagataatattttaaaaattctttaattttttcatataaatcactaccaactaatctaacagttgcattggaatttgaattcataatatctgaattattaccattaccattattaccattaccattattattattattaacatgaaatctctttgatgatgcagtacaataagttataaacttttgtataagtatttgtatacattaatgaatcaagtgaagaattttgatcatctccaagaattatattaagagatggttcaatactcttcccaagtactctctaaaaacgagtctggcattacacaataaacttactgtatcctagatggaaatgatataagagtacccaatatacagcccaactctactcaatgaaagctcgggcggcacgtaagttaaactcaagagttggaaagcgaggcaaatttaattattatactaaggtaaggtaactaaggtctttttattattatacgtattacataatcattaatattaactactagttcttctcatgataggagacaacatgaacaactctgaagacactgatactgaaattaatacaccagatagttaatgtaacaaataggaacgccgttaatgccttgactttaacacacattccagaatcaaatcagtgaatcactatcatttatatcaattgtacaaacccatctggaatcataaatcgattcaaagctaagtgataaattagctgatgaaaatataatgaaaattaaatcaagcataattaatctaattttagcccttggatttcttaatcctaaaggttgtgatgtaaattcatcatatgtaatgtaaaataaataaagtattgaaactgcttgaacaatcattgccattaatggacttggttgttgtgtaatatcatatttttgagtcattttaacgattctagctgataatcctaatgcaatacttgataatgaaattgaaattaatcctgaaaaatagtgggaaatatgaatttagttcttattgattctaaaagttttggtttccatgtctttttattttcatcaatccaatatttggccctttcccttaaatctctttcacgtctaagtctacgtaaattaaatttacgtttaagtctcattctacgttttttatatcctatttcaagatctgtatcattatcattatcattattatcatcatcatcactattaccacccctataatgtcgattataattataatcactacttgtttgatcttcttcatcacagatatctgaatctgtagttgtatcattttcatgaagatcaggattcatatcatgaggcgattcaaataaccctcttaatctattttcacctttccaatttgaccataaatcataatttttgaaaatacttttcattaatgcttcatccttagcttttcttatattttcttgatcttcaattgtcaaattactattattttgattaccgtcatataccagatatggggaaatattagtattcgtagtattagaactattattattattattattcatattcatattcatatttaaatcatttacatctaacttggcatcatcaataaatgcttgaggattaccattttcatacttcttactatcacaattcaatgaagtttgaacgggtatattagaatttgcaattttaatagttttcaaaaaatccccccatttaacattattgttttcatctataaaagtttcagtaaatggatctgataagttattattattatagctaacatcattatttttcgttacatgtgctaatctatcaataacatatggtggtattgtattagcatttaatctataataattatataaacttaacatatttggatcattattgggatttaaatttgaatttggaaattcagcattattattattattattattattgtatcgtatacgagaatcttcatttcttgcattttgttcaattttatttagtaaatctgatgttttaatgacagtaccattactttttttgataattatcataattttgggtcatatcaagtgatttgggtaatttctttgattttgagatatcttcttcatgtttatcagttactgatgtcataattagttaaaatttttgtatgaaacagtatttgtagcaaatgagttttctgttgaattagatatagagcagtagattctttagcaaagattttaatatgcaaataaattgcaaatatgttctttgatgtagatcaaatagtaataaaataattaaatccttaggaaaggaaattgatgtgacaataacttaatagggacataataacaataataataaaataataacaaaaaaaacatgtcgcttcccaaaagagtaattctcttctttatctaggagctattagcaattgacattgtctgtcaatggttagaatagcacaagtatcagtagtattaggacaatagtcaatgacaataactaaaggagggtataaaatatattgcttattactacttatatagcccataaaccctttcaatatcgatttaattgctataaatctgtacaccggtagtggcttgaacatttaagggctatgttacgctataataagaggagagtcttgcattaaacacatgttgatctgtatttcatatcctttattcctttcataaagataatgaatataggtaaaaacataggaatacgacacattggattaagatttaatagtaatttatctaaaagtataccaattagtgaaattacacctcaattaagtaataaaagaatttatttttatgcattaccaattacaacaaggaaaacatttattcattgtaaatataacaatgatatattccccaatggtaaggaaacattagagaataaattaattaataaatttacaacaatttggaaaaatttttcaacatctgatgcaagtattaataaaaaagttgttaaaataattaatcaagtattaagtaaaattccatggttagagacatgtttactgtcaattccatcacaaaaatttattacaagaaaattacgtgaagataaggaacgagaggaaaaatctagaatcaatagaatctgaatctcaaactacatcattcgttacacatgatacaattatttctaagaatttgaaaagtgaagatttagaacaatttgattattattatcctaaagggttaactaattctaaaataatgcttgaaacttttagacctgaatttaaacaacaatatgaaattcataggaaaggtatttataaagatttattattaatgccattaacaataccatttgcacttgtaccattattacctaatataccaggattttatttattatatagaatttattgtcatattaaggtaattgcatcattaaaatttttaattggacttttaaaagatttacattttaaatttcatgaagttgataatttaactgaaatttatttgagtacaaatgatattaaaattcaatctaatgttttagaacatttagcattaattaatgaaaataattcattagataatccaaatgatatagagggtaaattgttagaaatggatgaaaaattattaatatctaaggatgttgcagagaaattatgtgaagtatttgatgataaagaatgtaccgagaagttaatgtttgcaattgagcaagagagtaaacatcttgcagatatagaagctaagaatgttaatgatgaatagtatatttaagtagattagtatgtatattgtgtaaaacttataagaaaccctattattctatcaaaatatttagaaagttaagcctccaaaatatgtcaaaaattaataaaaacattacgtaaccttcacgtgcatgtacaaagggtttatcttttacaccctagaaccttgcccttattaccgcattgagaaactctctcttcttcactaataaatggataatatttcctcaacttggcgagggattggcttttcgtggaatgtacttgatctcttagtataagattaatatttattccactgtaactcatcttttctcctcctcatactttttattttatttcttctcttttagcatacaaccacaatgagagctaagtggagaaagaagagagtcagaagactcaagagaaagagacggaaggttagagctagatccaaataagctcttggaaactcttaaactgtcttgttgattaaaaaataactttaaatcaatcatgaaacacaattatttatcgtaatgatggtaattatcatttatttttaaccacagtggttgggaataagtgtttaattattatcattttatttaattttaagaaaaatcctttttttaatctaataatagttaatgttctttgcctattggtgttcgctccaagtgttgtttatacattctatatttatattatttatattatctctatatactacatgaatattgaataagccccattggctatgttattttaaaatctatcattacattgtaacagtaattacattaccatccatgataataccatgataataccatcatcagacccgtctaacatgacaacactcgtaacaattctcttacataattaattaccaccattttttttcaattttggaaattttgtgagggccgcccacacggatgacaaaacaccttattaatttggcatcttaatcttgatggatacatgtaatcatttcattgtaactttttcttgaggggacagactactttattttcgtctttaaagaagtatatacactaaattatattatcaactacattattgcttttctggaattatctcttgtgtcaattatttgtagtaaatatttattagaccaactattatacattaaaaatagcagtaaaaagaaaaaaaaaacacaacagttaatctgcatttcgaaagttaataccacttcacatatcataatataatataatacaatggatttagattcagatatacagatggaagatgccaatgatcttcaacaaataaataataacacagaaactaacactaataataatcaatctgatgaacctgaattaacaaaatcaattactaatattaataatgatgatgaaactaatacaacaacaaattcatttgtaacggaagttcaaatttcaacaacaaatcctaaaactcaaataaatacattagatggatggattgaacaattatcgaaatgtgaacctttaagtgaagattctgttaaagaattatgtaatatggcaattgaagttttgaaaaatgaacaaaatgttcaaccagttgaagtacctgttacaatttgtggtgatattcatggtcaatttcatgatttaatggaattatttaaaattggtggtccttgtcctgatacaaattatttatttatgggtgattatgttgatagaggttattattcagttgaaactgtttcttatttagttgcaatgaaagttagataccctaaaagaattacaattttaagaggtaatcatgaatcaagacaaattactcaagtttatggtttttatgatgaatgttttagaaaatatggttcttcaaatgtttggaaaattttcacagatttatttgattatttcccaattactgcattagttgataattcaatcttttgtttacatggtggtttatcaccaatgattgaaacaattgatcaagtacgtgaattaaatagatttcaagaagttcctcatgaaggtccaatgtgtgatttactttggtcagatcctgatgatagaggtggttggggaatctcaccaagaggtgcaggtttcacctttggtcaagatattagtgaacaatttaatcatacaaataatttaagtttaacagctagagctcatcaattagttatggaaggttatagttggactcatcaagatttagtcgttacaattttttcagctccaaattattgttatagatgtggtaatcaagctgcaattatggaagttgatgaaaatcataatagagatttcttacaatatgatccatcaattagacctggtgaaccaactgttagtagaaaaactcctgattatttcttataaaattaaactaacaactatacaatgatttgctaattaaattttcaattcaataaaaaataaaattcatccatctatatattccaattgataacttttcttacatactttatgactttatttttgtttcaatctttgtctcatttttatctttctttttacttctgttttaaactaaattcaatacttttttttgttcaattcatcatacattacattatactaagtttgaaattttttacattttttcttttgtatttaaaggttttatattatatcatcaaaattatgtctttttaaatctaaaaagaaactaaattttatatttatatcattaaggtatttattattaaaagtacacatatcaggtacatattgtctatattgtataaaaatctattttgtaatttgaaaagtccatggtaatattaaatgtgcaactttatcatcatcaataaatttagaaactgcactatatgaacctcttgctaaaaatccacttggtgcttcaacttcttcaaattctttttcataaaatggtttatcaacagtatttggtgcataactacccattggttcctcaattttatcaactgtaataccagcctttttaacaccttgtaaatattttaatcctgtaataatttcatgttgaactttaaatttaataattaatttataaatacttttctccttaattttaaaactaatttttttatcctttaacgatgaataatctttttcattctctaaattaataataactggttcttcaccttgaatttttaatgtcattgaaataatgacaactttacgtttatcaccattttcaactggtaataaatcaccagtgtttaatcctaaacttaatttccatttatttaatgattcatcatttgcatcaagattagcatattcttcaattgttctcttttcactaactttgaaacctggaactgattcaggttgtaaatctttaaattcgtcactcattactttttacttgatatatctaagtataatataatctttactctagatcaaaatatcgatcctctaacactaacgtgaatcgatggcgtttcatgtccacgtattatttcttgataacgtaatgttttatgaaatagatagtctcatagtcggtgtttcatgttgttattcaatcaaaggaccattagcatgatggtaatatcaatagccctataactttaggctttctgctgatgtctgtaactgattaatctgccaattatcagccagttttttatttatctgtttgtattactatcaaatacataccagatattgaatactaacacttaaagtaaacttttgtaaatttcggagatcaccggtataccggtttctatatcatgaattcaaatttctcttagcaaaacttattattagacttcactgattaactcttttcttcttccaaagatgtcaattaaagcaccggaggaacttaataactgcagtacaattgaacttgaacagatattagatcaattatttgaaccatgtagaacattaactaattttcttatccccaaaatccaaaaacatcagtcattcagttcatataaagaagtacttgaatattgtagaaataatttgatgtcattacttaacaattataaagaatgtaatgatgaaattgaaaaatccgaattacacaaaacactatgtaaaatagtatcggctcatccaaggttaggtgtccctaaagataagatatcttccttatctaaagactcacaaaatgaacaaaaatcattaacggagggtgaccctaacggtgaacttgcacaaaaattaaaattacttaatgataaatacgaagaaacattccctgggctaatctttgttgtttttgttaatggtagatcaagagatcaaattatgaagataatgaatgaacgtatattaaatagtacttggataaatgaagtttcaatagcttttaatgaaatggtagatattgcatttgatagagctaggaaagtaaatgcaaaactctaaacatatttgattaataataacacaatatcattttgtactttatataaattatattgtatacacaatcttattacatataagtttaaaatgtttctttttgattgtattcataaacatcattcatgatcatctttaggtacattatcattcacatcatcagtttgtgattgtgtttgatttgttaatttttcattttttcgtacataacccttaccagatctattactattattatatttattgtttctaccacttcccataccataaccattatttatattatcattataatacatcattggattactaccaggtggtgacgctctattataaaatgtgttattatttcttgaattcggattagaatttgatacatttggtggtggatagtaatattgataaactggtgtacttgtattaggtattattggagtagatgcaagtggaattggtatagagtttattggtattggcatagaatgctgagttggtggaactatcggcgattcccttgaattcagtggtgtactataacctggagatctagatgatgcacgattattggttgtttcagattctgcattactggaatcatcttcaatgtctccattactataatcattcagacgattatcaatattttcagttggtggaataactggaacataataatagccagctgatgatgatccaagtactggtgatgtcattggaatgttgtttgatggtatatgtacaggaggtgctaccatatatccataggatgtagattgtggattgttatattgatacatttgattattcggataatatccgtagttattatatccatagttattataacctggattaccattattattataattcatatttttattgttcagattgctatttctcctataatttctaccctttctataaccgttgttattaaaatctgatcctcttctattatatttattcttgttattgtaattgtattgattataattgtaattattattgtaatcatttgaagcatcaggattatagttgaatgtattattatcatttagattatacttatattgatcacgacttcttaatgtcccattttcatcttgatttataataatttcagtttcatcatctccttcatcattaccttcatcttcatcctcattcccttcattttctttgtctattttctccttcgccagttgatatctttcttctttagttaatgtttcttcttcatcaacaatactttttataggctgctcatttttttgttctattggggttacttcatctttacgtttcataatacgtatattggatgtgttgttatctcttatatcaagattctgaaattgccaacaatatctccaccattagcaaggttcttattattattattattattattattattattattataattattattataattaatatcattattgttgttcaaattagctttctcgaattgtgctttataatggttgtataaatcaaacaacttcattctatttaatttttcgtttggatcaaattttaaatttctaaaatctaatggtttaatattacccgaattatcaaatgtagcagattttttagtttcatcatcagcattaattagtgatgtattaattttaaataaaaccattgaagatccatcattcgaaagaatatgtcccagatgataatactccgctaattgatgagctaataatctataatatgagttcagtggtctcattttcaatgagtcgatattcggtttgataataaaagcaataatttctgcttcaaggctcaagagaaacttacaaacattatcatcatcaccaaatggagttgttattattgaagagttattattgatatcattagcaggatataatttctttttcttattattaaggtcaaatagtgattttataagaatatcaggtatatgataatgattagataaaattcttactttttcattaacttgttcaattccatcaatatctataaattcaaatttcccaccttcactaagtttcacattattatcttcactaacatcttcactcttaaattcattagttggctcattttcaggttgttttgactttgtggcgtaatcggacttattcttggtatcttcgataagagtttccatgtgtttatttaagtccggcccatcatccccaatattaagaacggcatctgttgtctctaatgtcatgggatttgttactatgcttactaggaatcgattgatataccccggttgttatggataagccttgaaagaaaatatacaagagaaaatagaggtggaaacctgagaaaaaaagagcttaccgaaatgtatatagtagatgagactctattaaacaaagcccatattttctcttttgcgcaaattgcatttcacatttcacccattttctgtctctttaaattggtatagctacaggtattaatgcattggcaatcatattgaacggtctacaatctatgtagtatatgactgtagttacaacactattttaaattaacgataaaaaatctatataattttcttgcccccataggtccccctattatcattaagatgcagctaaggttagctcattgcaacatcaccatcgttatctccttgattcacgtttctgtaatctcttactttgaatccatgctgcaatcttttcacgtaattcattatcatcggttacatcttccatctttaatggcatacgattgaatggatcagttggatcattcattaaatgtgcctttaaaacacttctatcgatcgatatatgtgatgttggtaatttaacaggatctttcattaatgtatacattaatggatcaaggaattcatcaggtgcttcacctaattctaattcttcctcttcgtcagcaaccttaatactttcagctttcttagcaaattcaactaattgaccctcaaataatgaatcgggaattttaaaactcttctttagaatattgattgctttataaatattatcaacattgaaagatcttaaatctctagcaacggctctaataaattcttcacattgtgataaattaatgaaaattgaacataattggaataataattcttttggatcaaattgatatttttcaggatctttaacctttaattcattatatcttggaccaactagaacaacctaaattataatttaacataccagctaatctatcaacaatttcaactatagtgaaagattttggtgtctctttagtaaataaattaaataaaagaatagtcttattacttaattgaacaaatgatttagccattctttcactttcttgtaattttttattaatatcctcatcactttcttcattatcggttttaacacctcttgatcttaaattaagttccttttgacaattatgaatagtatgtaagtgatttaatgattcatctagcaaatatgtagtatcattcaacattctagcaacaaatctaataaagaatttttgatttttagttgcaattactcttaaatctttcttgaaaatatcaaatttccataatttttcaataataaatgaaatatgatatcttgaattgaacttatcatagaattgagatgatgcaccagttttttcaaccataacgtaaaaatctaataaggaaatcaatagattcttttgaatagtttcttcatcattgaaaataccaatcatgaatccatttatttcaccattgttactttgcattggtaaatgatccaaagaataaaacttctgttaatctagccttcaaatgtggattacttaataattcaggacatcttaataaaataacctgaaaattcaattaatttagttaatttaacattattatcaatcattggattatttgtgaatttggatataaaatgacaataattaattaaaccttcaatataaatttctggataatatttgaaaggaactggtgcaagttttccttaaatactcaatatcatctaatttttcaacttcattatcaaaattattcaatggaatttgtaaatatgggaaaaaagctaccgatttttggatgatatgcatgcttagagtcaattaatctaactaaaaactcacaaatacctacaataacatcaaaaacttctaattggaatgttcttgcttggaaaaacatttctatagaatatatatcattttgtagttctttaagtttagcttccattggagctaatctcatatttactaatctttgagctaatgcattagccttgattacccttttccaaaatttgtttcatactagtgatttgttcctttatttgctttatatgcttcttcttcttattgtaactaacaattacaccacctaaaccatattgtaaatatgttaacatcaagtaaaaacattctgaaacaaaatttaattttttaccatctttatcgtataatttgtctttataatattcatcacattcttgtttagttgaattaattctagtttccttcacttaagtcaatttcattgtttgaataattcaagaaatcaagtgaaattttatcaattttacttgattgaccttctcttagaataggttctgataatttaataaggatcaatgaaacattcaacataagagaatctgatgaaattttcttttcatcaacatgttcactcattcttaaatgattcttattgacaagtttagagaaaaagctcaaaatttcagctctagagtttgcattgactctaaccagggaatcaataattgaaaataacttattgagtaaaattgaataagtcgtgcttaaagattcattgattgatctgacatctttcttatttatgacaccaatataattatcagctgaaagtttagacaaaagtggtgaaattcttaaaattctaccaagaaaagtatctttctctaattgtgttggatccgttatgttagaaggattgaaaaaatccatttggtgaatatatgaacatatgcttttattataaatcaaagattcaacaattaataaaatattgttataaattgaacttgtaccatttgatgatacattaatagaattagaatctaatgaagaatcaatttgcgatgttaatattggagtaaatgagttaagaaagtctaattcaatttgattatcaacaatggcgtttaatatagaaatgaaaaaatcatggtatctattaatatttttcgttaaatcttcaacaacatttgataaattaggactatcaataaatgtatcaggttcatagaatagaattgatgcataacctgaacataaacgcttaatttctttataaaatgtcattttaacatcataatcatgagttgcatgtttatttttggttaaatgcaatttagaaatattagcattattccaacaatgaaataaatatttcaagggagaagaataatgattcgtaactccttgttcaaaaatcagagatgttaaaacagcatcaggtccatcaattaatttaaaatcagtcgatccagtttcttcgtacaatgatcttaaaaagattaatgatttactttcttcatttggtgtaagtgtaacctgataatgtacgtttgatttcactagcttcccaagtacccagatcaatttcttgtgtttttcctaatgaggaggatgaaggagaagaagaagttgaagcaggcaccggagtgttttgtgaggaattaattggtagatgaagaactatttaatgatgtattggcatcagccattagttgatgatgaaggctttggtgtgttagtttcactattagtcttagaagttgaattatttcccagtttttgctttttatttaaggcttcaagtttggccaatcgcatggctcttatttcatcttgcgaggaagccattttgtgtaattataagaaattccttgatataattaaggataaatcagttgatgagcccgtatcaattatataccagattgacactgcataaaataataagattcacactattaaataagctgcgataataattttttttcgccactgagaaactacactacgtaacgtcaacaatcgctattataataggttacacaatgatagatctgattatagtatatcatactgatagataaacctaataaataagaaaagagagttaaatttttagtttatttattaccacgtagtatattatattaattaattaaaatatataatcatataacttaagctttaagagcaaaagtcttaactgggtaagcaatagcagcttttcttgctctttcagtctttaaagatttttgttcagtagttaaagctcttcttaaagctctagtcttctttgctcttaattcctttggaacatatttcttacctgcatataaagctctaactgaagctctttgttgtgcattgataacggttaaaactctagcaatatcttttctgacagtcttaatctttggaacaaattgtttggttaatttttgaacctttaagtttgctaattctttctttaaatcaacaagttgttcttctaattgatccttagacttggttcttaattcgaatgcttttaatccagcctgtaattaaaatgaatatttgaggaaggggaggtaatctatgttagtatgttattcataataatgtattagaggagagaaagtttttcgagtagatatctttactgtagctgatagtttcattaatatttattattgtagaaaatctttgaacttgaattattattgaatatttcttaataacttcatagtctttaaggtattgtaacacagaacttgtaaatagtcttaacaaatgaataatatatttctacattaatctttcaatattattctgaagtagttatattgataacttatattgcaattgttataaattctgtaattcaatgtttaatcatgtattatttgctaattcattaacagtttacttattctaaataacttcactataacagtattgattctctacttaatgtctcttcatgttgtatatctattacgtaccattgtgtttgatgatctcgagataattcaaagagtattctaaggtaaaattacaactgaaaatttaatatgataatagcactaaaatttgaaaaaaatcaaccacttcacttacttcgctaatactaagaaaaaatttactcactgtgaaaaattcccttttcttttctgtgactgcttttttcagtttccacttcgaaatttcgctatcttagaaatcctattatgagaaactgaaatttctgtgcgtcgcattctctgccttctctgtcgttaaaactgcggtgcaaggtagtgcttattcaaatattgcttatgtcattactggcaattttatattagatggctcagctcatcttattagtttagtttagggatattatgaagtaatcaattttaagaatacaacaaacaatacataggagtataaaaataaaatattacaatatttaagatgatttcaaagtaattgaggtaagtagtagtaattaagtaaaaaagtaagtaaagtaactaaactaattaactaattaagtaagtaaaattgaatttgattaatttgagagggtgttcaagtaaagtacaataacttatttaattatttattaattaagcactattttttaaggtattagataaccattctaaaccttcatataaaccatcaccagaagttgcacaagttgcttgaataaaccatggtcttggtctaattgattgaagacctaatttttcagtaatttctgctgctgtcatagcatttggtaaatcttgtttatttgcgaaaactaaaagaactgcatctcttaattcatcttcattaagcattctttgtaattcttctcttgcttctgcaattctatctctatcattagaatcaacaacgaaaaataataccttgagtattttggaaataatgtctccataatggtctaatcttatcttgtccaccaacatcccaaacagtaaatgaaatgttcttatattcaacagtttcaacattaaaaccaatagttggaatagttgtcacaatttcacctaattttaatttatataaaatagtagttttaccagctgcatctaaaccaaccattaaaattctcatttctttacgaccgaaaaggccagataataatttagaaattgataaacccatctatgtttaaaaaaaagataataataatgtatatttatgttagtattagtttcaatattttgatcttatcagattatacataaaattttagtcttcaaatctctctttaattcgtataatcgtgataattaatttgaaattttctattgtcttcaaaaagaacacgcgcgctcaattaccctcctttatgataaggatgcacttaagcaaccactttattgtaatggatgagctgtatgataggacatgtaaatgtaattgaattcaagtgtagttgactaaagtatgtatttcttacagtgcaatgtaatatatttgaactaatattgaaaaaatatacttatattcaatacgtgaaaacatgaaacaaattgaataataatgatttaattgtaatgatagtaaaaagtaattgctcattataagaattgtcaaacagcaatactatattatcaattcatttttgtgtaatatttgtaacaatataatatttgaataaaagagatgataaaagataatttgatgataattgatatttggataaaatataaacatgcaaagatagtatataggaaataaatcagataaaagacaagtagagtaaaacataatgtattaattcattcatttaagtgatgatttaagatgaaaataatattgaaaaacattgtttcatatcggtgtttgttttgaaatctttcttgcaatagtataggtaattgactagtatcatataaataaatcaattacccatataacatatacataacgctcaattgcaaataaataatcataaatgatcataaatttcaaatcaaacacttattttctaaaaaaaaacccttgaatcaatttaatccttatgtatttgctccacttaatcattattttcttgattccttcccgttatctatattctccttacatatttcgcatagattaataatacataccttttgactgtgtctgtgtagatgcctttgaagaaatcaaaacaagaaatacctattcaaagcaaactattgccacccaaacaaaaaggacacactcaccaatataatttcagtaattgagaaaattggacgtcggcccaatagggaaagagcgcgattttcacctagctcagaaatctgatcgcatgatgcgaaatttgatctcagcttaaaatcagcccccttttattacccgtttaggaacttttgttttcacgataatataacactacatgctagagaaaaatggtataaagtatttaagttagatagcaatgactgaaggaggttattatattatttatttaaaatatttttatttcaatatccacatttaacgaccaatattgactttacatgtagaatatttttgaagtgcacgtaaaaatacaacatatgaaacttgatcattttctggttcccaatacatctcacttaatctaatatgccatggtggataaccttgtaaatctaaatatggttgaaacataacaattaaatcaggttcttcaccaactagttgtttaagttcatgatcaataaaattaattgttacatcacttttcttcatatcaccacttttaaccatttgtgccattactttagtaagttcaacaattgtttgacgtccatcaactttacctaaaagattaatttcaatttgaaattcttcattatcaatatcaatattaatagtaccactactattaatatctttattattatcattttcattaattttattaatttttttccccttagaatcatataatcctccattaataccataatatgtgatatttaaatgtggaattttaatcataaattgtggtacattttccataccgaaatatgcttcaaattttttataaattgcatcactaaattcaggaattgattttttcaaaataccatttgtttcataaatagttaaatggggtataccacttgaaacacaccaagcagcaactaatgatccatcattacataaaccttcaatacctccaccttcttcttgttcacttttataatttaaaattgttgctaatttatgaggaattttcggtaatttattaacatctgcattaattatacttggatcatcatttgatttatatgccatacttaaaaatttaatctttgttctagtaattgaatattcaaataatgcaaatattgaaaacataaaatagaaaaatgttaaaattgatctaaaaaaataaaatgtgattaattcattaattaaaatattattttcatcattaaaccaacgtttctttaaattttcatcttgtggtacaattaatgaacgaaatatcgaattacatgattctaagaatgtttgatttgtatgtgttggtaataaattttgtttcattgatttattaatggaaataccattatttttttcactttgattgatatgagccctcgttttttcaaacgccttttccttattaaatcccccattttgttgctcatcttgataattaggttccatatcagtaaccttttcaactttagagaccattctacactaataataagttgttgatgtctatattttttaagattagaagaaaatctagatagaaatatttctagtgaaagatgacaaaatgttaaatttttgaaaatttaaatcatgtcaacttcgctgagcatttttattgatataattttcattatccctattacgtaatatacaagttatctattcatgatgaaccattcggagaaccacttctccgtggatgtaaatcaattcctgtttgattactgagatcatcaatgatagctcttaatgtctcatggtatgcagtgtcattattattattatcatcatcatcttcacggtagttttgtaaattttcgtcattatttatatgatcatctccatataatgcataattgaaatcaacatcatcaatatcaatatctatatcatcatttgattctccatcaacacttgaatttaaaacctcattattatcagcatctgataattcatccgatggataatgatcattatgtatagctaatatattatcagataaaatattatcacgttgatgtctttgttcccaaattctcaaatgttccattggtgataaacttgaattatttgtcatatatcgttgaagattatttccagtttcagtcatacctgtattatatttaattatatcattatcataatcattaccatcaatattattttcatgattatgattaatattatgattatcatcttcagttttatcacctattattattattatctaaataaaattcatttttcaaaatttctttattcatttccggtgatctataagcatatttacatcttctatacaattcatcaacttcttctaacattaaacctttagtttcataaacaaacagtacagtaaccattaatgctagtacattaaatgaaccccaaaggaaaaaaattctagtacctaaagtaccagtatgtgcaccttgatcaacaatatagggagttgaataagcaaaaacaaaattaacaatccaattagtaccagcagctaatgaaactgccttttgtctaatcgataaactaaataattcaccagttacaacccaaacaactggaccccaacttgatgcaaagaatgcaatgaaaacacaaacaaatgaaagcagaactttatttgaaacaattgaatctgtatttaatccaacaattgcaataacataatttgaaacaatcatacctaatgcaccaataattaataattttcttctaccaattttatcaactaataaaattccaggtattgtgaaaacaacgttaacaatataagttattaatgacattaaataagattcatcaacacctgtaccaacgaaaaagaaaacaccataataaaaaataaaattaatacctgaacattgttgacatgcttgaattaaaatacaagttaacattctagttaattgttttgatctaccatctgaactttggaaacaatctctataagttgccttaccattactaatttcataatcatacgaagctttaatttcaatcaattcttcaactaattcatcatcattaattgataatcttctaaatcttgataatgaaataattgcaccatctaaatcatttttcattacaaaataacgaggagattcaggtaaaaaccaaaatccaattaataacataaatgcccaaacaaattgtaaaccaattggaattctaaaagattttggattattcatatttcttgtaccttgagaaattgcacttgaaactaataacccccaagtaattgcccattgatacattgaaataattgaacctctaatccaacttggtgatacttcagcttgatataatggtacaactgatgaaacaataccaacacctaaaccattaagaaatctaccagctaataaaagtccataaatttcagaacaaatttgtaaaataattccaatattaagtataaataataatgttataatcattgaaaatcttctaccatatttatcagaaaataaaggtgcaattaatgaacctgtaaatgtacctaatgataaaattgcagttaaaattgctctttcacttgatgtaaaattatgatgatttgaactaaaatgtgttttgaaataattcatttccattaatccattaacaattccagtatcatagccatagagaaatccaccaattgcagttaataaaccaactaaaactgcaataaatgatgatttaactttatttttttccatattttcaatacttcttaattgtttctctctatctttaatgaaaaagtttttaattaaattagttattgtatcaatcaatggtctattacgtattttctctttactaatgataccattagtttcactattatcattattattattattatcatcactattattaacattcttatttccggtacttaattccgataaattgttaaattctatatcatcagataatttgtttttgatcatactattccctcgttgtgaatcttgactattataatcaacataccacatatcgatcgcccttatcaatatattaactattccttactaaaacaacacacacactggataaaaaactaatcagattctagtgaatgacgtaaaaaccctttaattaagataaaaagaaaaaaaataatttgtggggggatttgttaatgagaagaggtcgcaaagtcgtgtttgattaaattttatagatctataagctgagccgagtttttcattgcattacacgttttatacactttatttacagaattatttctatttttatttctatttcatgaacttaaacaacgagaatcttttagatgacttcctgatcttactggtatcttctatttcagtattgtctttggatttatctgcataggcattagcattgtcattatcaagttcattattttcaactgtttgggatgggtttaagtttttcaattgacgtcttgtatcattttgagattgtagtggaacatactttaaaggtgcatcactatgcttttttctattaatttcctcatctatcacttcatctaattcatctatattttccctatcttcatcagatacaaaatcattaaaaggtttttcatgtcttccgtcagatattgaagatttacgtttattaaatattccacttaaaaatgatcttctctttacattattgatattattagttattatttgtatttgtattaacattggtattaattgattgtttatctacattatcaataactattgaaacagccggtgtttcaacattgtttttattatcaataattgaatcattaacaataacagaatcagaatgagttattgtatccattgaatttcttggattaataattatcggagttgatggtaatgaaggtaataaatctttttcaatacaaggttctaataaattattcatatctttagttcttgataagcttcttggtaaataatcaaaagaactgtttgttgaattatttgaaaatgttgaaatatttgaagaattcgatacatttctctttttgataaataaacttgatgcaaatgaaattgaatgtgatatatttgaagttatatttgtattaatgtttgtattagtggtatttatattgttattattagtattattgttattagttgatttattatttattatatgttcaatttgatgtaattcagatttaataaaatcagataaatcatcaattattattgaagattctaaaattaaatttgttaataattcttcatttgtaagataagaaaattttaaatcttcagtactaaaacttttagtacttgtcattaaatccacacttttaaaaaaatttaattggaaaacttttgctaaatttgatgcatgcattttagttatctctgaaaattcttgtcttgaaataatattaaggaaattaagtaagtataaaagtaaatgtaaattttctattggtaattttttcaatgcaattgaataaattgatttataatcatttcttgatggttgtattataataggtatattattattaattttttcaaggttttcattggtatcttgatcttgattttgattctgattttcaatatgactaattccattatgaacttcctttattggagaatcatttaaatttattgaattagtcatatcaatcaatgattcattatccgatatatcattcgatataggtatattattattattattattactattatctgattctgattcattattatcttcaatttcacttggataatctatattaaaggaatttcctttaattttacttaataaattagaaacatcagcagttattataccatcatctaatttagcaatccatcttttcaaaattactgcaacatctaaaacagttgttaaattatttgaattaaatttataatttaataaatttttatataattcagattcaatttgattaacttgtttaattgaaccattcattctaaataaaccttcaactggtggattatttaaaatataatcacaacatttaaaaacaattgttggtatgattaaatcaattttatcattatatttaaaagtataatttgcaatgattaattcagaatcaatatattttgttaaaattttattttgattcagatttggagttgatgaagaaaattgtgaatttgaaaaaaaagttgaatttggtcttgaatttgaatttgaatttgcaggtattgacttttgattattatttgaaattgcagtactatttaatgagaatgaacgtctatttgcagagaaagatcttcttttcggattatttattgtagtgtggatagtactgttattattattattattgtagttattattaaagttattattatcaaatgattgatttgaatgtaaagtaaaagcagatattgatctacgcctattttctttattattagatggagatagagtaggagataatgttgttatcatagtattactatatttcattattatggtattattatggtgtattaggtaatatggatgaatgtgaatagacgagatagactaagggatgatttataaagtaaataagataatatgagtggataatattaggtagtaaatacagaggatgtgaaataagataagttataagttataagttaataatataataacactaatcttttcaatcacaataataagaaatcatcacaataaaataaaataaaataaaaatgacaatcaaagtaaacatgaaacaagatggattaaacaaggtgcgcttagtgaaataattcaaggggtttcaattttaaaaatattaaacgcgttattttattttattatatattatattacgtaatcccgcatcacgtgactgattacataattacagacgcgtctttttattgatttaatttatttattttccattacgtaatattaataataaatttatcctgtttatattgtgaagaataaaattattatactacgcattgtaacaataatattccctttattatgtaaacaaagagttatcttcatgatttattgttattattattattgattatatgattaatcattaatttatcgtgattgactatatattcttgaataatatacactttatagtatatactctcatatattcttatacccattaactcatagttacactatattcagatataaccactaattaacacataatattcaattcaattcaattcaatttaatttaataattaataataataataagaataataatgatacacgaaaatctttattctgctacttattcaggtgttgcagtttatgaatttattcatccaaaatcttcagttatgagaaggaaaaaagatggttgggttaatgcaactcatattttaaaagttgcaaatttccctaaagcaaagagaactagaattttagaaaaagatgttcaaactggtattcatgaaaaagttcaaggtggttatggtaaatatcaaggtacttgggtacctttaaagagagcaattgaaattgctcaacaatttggtgttttaaatgaattaaatccaattttcgattatatatcaaataattcaataactcctcctccagctccaaaacatcatcattcaacaactgctaatggtacaagaaaacaacgtataaataataatactaataatactaataataaagtaaagacaattactaaaaaggatgaaactaacatacgaaataatgatgaaaataaccctaatgatacaacaacaaaacccaaatcttcaacaaaggctaaacaaaaatcaaaatcaaataatcaaacctctgatactccaactaaatcaactagaaaatataaacgtcaaaaaatttcaaatattaaaacagatttatcattaaactgattcatcaatacccaatcaaattaatgatcaacaaaataatttacctattaataattcaaaaaattctttacaattaccttcatttaataatatgaatttatcattaaattctgtacccgttcatggaatggggataagcaatatgaatagtatgaatagtatgaataataataatatgaataatatgatgatgatgaattctaataacaattttgatcaaagaagaacgttaaaagctccaaaaggtataatgtctccatcttctactaacatattctccatataataatatcaataataataacaatttggaagctgatttagatgatgaattagaagatgatgaaaatgaacagaataatcttaatgacaataataatagacaacttgaatctctctatcgccgacttcatgaaccttcaactgttgaatttatgtcagaacatgatattgataaagcattagcagagagtgaaacatatgggaatgaatcaaaaagatcattacaaaatgattcattttttcaaaaattctaaacaatttaatatgtcaccatctaactcaataaaagaaaatcaacaaatttcaatacaacagcaacaacaacagcagcagcaacaacaacaacaacaacaacaacagcaacctcaattagataaaagttttgttaaattgttatataattattttattgaattagattcaaattcaaattgtgaaatgccatattttattacaaatgaatcaaaagattttaatattaatcaaccaattgataatcaaggcaatactgcattacattgggcttgttcaatgggtgattataaaatgtgtgaaattttaatcaatagaaatgcaaatactcaattattaaataatcaaggtgaagaaccattagttagaagtgtaatttatgcaaattgttatacaagaagaacttttcagtaaattattagactttatttaataataatttactaatctagattataattcaagaactttattacatcatattgcaattgcaacatcctgataataataatttaccatcatcaagatattatactgaaattttattaagaaaaattgctgaaaatgttgataatattaattttaaaaaatttattgataaacaggatattaatggtaactactgctttacatattttcagttactaataatgcaaaaaaatgtattaaaattttattaggttataatgcaagaattgatatcggtaataaatcaaataatttagtaagtgattatttaagtgaaaattttaaaaatgatatgaatctacataataataataatatcaataatttaaatcacaacactcttcactaatgatgaaaataatgaaattggcgaatcttttagtttaagaccttttaaaccaatgttacaaccaatctactgataataatagtataagacaagataactttaaaataactaattctattttagatccatttcaaatatcaacatcaaataatttattaaattttggacaatcaacatttttaccaaatttattaatgtcatttaatcaaaataaatcaaatcatttaagtacaacatcaatgaaaatgaatcaattaagtattgaaatggttaataaattaaatgatttatcaaattcctttgattctgaaattaaacaaaaatcagatgatataaaggaattaacatcaattgttgaaacaatgaataatgatattgaaaaaattaataatgaatcaaatgaattattagaatcctgtttctgttaatagaaatgatgataatattttaaaggataaattaattttattagataatgaatttaatgaaaaggagaactattttgaaaaaattaattgatagatcacaggcaatggatttagctaaaattgttcaaaaatgtgaaaatgagagtttatcaaaaattgataataatgataatattaatgataatattaaaaataaaccaatttcgaatgatttaattttcaaattaattgaattaacaaaattacaaataattaggaaaaaatcagttgaaaaaattgttgatattaattcaatttcagatactaataaaaatataattacaagttataggaaattagtttcaaaactgtcaaatatgccaattaatgaagttgactatagtttaaatagtattgaagaatgtcttaaaagagatttagggagagatatggtattaaatatggaagaggctaaatagcgttgattttcatgttgtataattttgtaaatatgtaattataatgtacacttttcgtcaacctatcagcatgtcaattaaagaatcgttatgagctcgcaaaacggagattctaaaatttatgttctttcgataacaacaaacctttttttttatttaatatttatcaacaatgtcaggatataaactacaagataatgaagttcaatttcaattaaacacccccactaaagattcagaaactttcatatcatgtattttaagtaaacctgaaaaatcttccccaattaccaacagagcagcaattttaatgcatggtattggagctcataaaaattcatgttatatgtcaaaacttgcaaggaaattatctaaagaacaaggtatttatgtaattagatttgattttagaaattgtggagattcaagtaaaactggatcaaagggtcgtacattaaatgatgatattgatgatttatcagttgtttatgaatggttgaataattttgaaaatatcaatggtggaaaactttttgttgatacattagttggacattcaaggggtgttgttgatgtattaaattggcaattacacaataaggataaatttataagtaatttaggtttatgtgcaggtagatttataggatctggattattagagagtattaaggttaaaaatcctgatgttgaaaaaactggtggtcattatattaaaggatttcaagatggatgttataaggatgtttgggttccattggaagaaactcttagtttgagtgaattatatatggatacagttaaggaaattactaaggatactgatactttaacagtttatggaagtcgagagaatgttattccaataacagattgtgctaattatgttaataatttaaaggatagaaatacattgattttaataccagatggtgatcattgttataaaggtgttgataaaatacctgagagtgaatgggaaaattcaactattccaattgataaaaaattaggtgtctgtgattataattatcaagttgcagatgaaattgctaaatggatgtctgaagatagtatgaataagagattttatgaaaagaatttgatgattgatgaattcacacctagatggaagaaaattgaaggtgttggtaattttagagatttaggaggttggaaatgtaaatctggtgaaagagttaaaattggtaaagtttttagatcaggtaagttatcaaatattacagaagatggtattaaagagttaaaaaaattaggtattaagaaagttttcgatttaagattaccaattgaacaaaaaatgtcagataaaactgaagaatctaattggactattgaaagtgatgtcgaagttattaaattaattgaaaaagatgatatggaatcatttgacggtgtaaatatgttattaaatttaataaggctttcatttgattggagtaatacagtagataaatataagtccacattagaagatataatcccacaaacaaaggaaattttttatacattaagagatgaaccaaatactaaaatattaattcattgtggaggtggtaaggatcgtacagggttagtttcaatgattttacttttaattttaggtgttgaaccattaattgttgtgcaggaatacgccttatctcaacaaagtattaaggaaattaataatacccgtaataaatcagagaaattgatagattttattgaaagttcaacaactacagttgaattcattgaaaagaataaaccatatgattcatggcaatataaagttgaaggtattgacgcattatcagatgtacattctaatgtttgtttatctacaatttcttatttaattaaagaatacggtagtattgaaaactacttacgagttaagatgggtattacagaagaggatatctctattatcagagctaatctactccaagaagagagtgtattctgaagatcccttaccgagaagtgttcaaattggcccaacagagggtgtttcaagggagaatgaggggggccattttctccgttaccggctatataccacctgtgacattttaaatttttaaccggtaacgggattacggagatgactgaatttttgattttttttcaattttcacctgattacagcagttttccattttatttaattataatatctactttcttttctagtttaatactgtataatcttaaataactatactctattcaatcaacaatggcgtttagacaaagtatggtgatgcttaaggaggcatccagacttgcatataaaaatatgttaagggatccttcagttaagtattcaagaacaaaagctattaaacttcatgatagaacgtggcctgataaagttattgacaaacctccaagatggttatcaacagatttaagagatggtaatcaatcattaccagatccaatgtccgttgaacagaaaaaggaatatttccataaattattagaaattggttttaaggaaattgaagtttcattccaagtgcttcacaaactgattttgattttacaagatatgcagttgaaaattgtcctaaagatgttgcaattcaatgtttagttcaatcaagagaacatttaattagaagaactgttgatgcattaaagggtgcaccaactgcaattgttcatacatatttagcaacatctgatttatttagagatgttgttttcaaaatgtcacaagaggaagcaattgaaaaagctgttgaaactgctaaatttgttagatcattaacaaaggatgatccaactttacaagatactaaatgggtttatcaattttcaccagaatgtttctctgatacaccatcagattttgcattaaaaatttgtgaagctgttaaagaagcttgggaaccaactgttgataatccaataatcttcaatttacctgcaactgttgaagttgcatctccaaatgtttatgcagatcaagttgaatatttttgtagaaatataagtgaaagagaaaaagttgttgtttcacttcattgtcataatgatagaggttcaggtgttgcagcaattgaattaggtttattagcaggtggtgatagagttgaaggttgtcttttcggtaatggtgaaagaactggtaatgttgatttaacaactttagcattaaatatgtatacagaaggtgtttcacctgaattagatttttcagatattcaaagtataattgatgttgttgaaaaaggtaataaaattccaattcatgaaagagctccatatggtggttcattaggttgtttgtgcattttcaggttctcatcaagatgcaattaagaaaggttttattgaacatgaaaagagagttgctaatggtgataaaagatggatgatgccatatttaccattagatccaaaagatattggtagaagttatgaagcagttattagagttaattcacaatcaggtaaaggtggtgctgcatggattgttcaaagagcaattggtttagatttaccaagacaattacaaattttattttcaaaagttgttcaagataaggcagattcattaggtagagaattaaaatctgatgaaattgttgatttattaacagaaacttataatattgattcaaaggtaaataattcattaaaattagctgaatataaatatgataaagtttcagaggaagttactaaagtttatggtattattgaagttaatggtgaaaaaattaatatttcaggtactggtaatggtccaatctcttcattattggatgcatttggtaatgcattcaaaactgaattagaagttgaagaatattctgaacatgcattaggttcaggttcaaaaactaaggcagcatcattccttaaaatttcatgtaatgataaaactcaatggggtattggtactcatgaatctgttactaaatcaactgttaattcaattttatcagttgttaatagtttattatcaaagaatattatttctaaataataggaataatatcattaataaatgtactttataccaatcagttttttaaaggtttataactatatttttttatatctattattcatttctctgtttattacaatatttatgatggatacattaatccattcactacatttttcaggtattgaagtattttcattcaacttctaatttcccaactttccaatataatggatgattattataataatccaaccaatgagtaattgtattttcaatataatcattatcataacccgtattcttaaatcccaagtacattgatttaaatcatggaaacatccattaataaatatcctagtacaatctttacctttaaaaattgaatatcgagcagtaatactacttgggtcatacatttccttattcaaagtaacatcaaatacagttctattaattgatactaaatatctttccttttcattaaataatgattcaattgtataattaatttgtggtgaaccttttaatttatatgataaataattccaatctacatatttagtatcattatacctccataatgttgttgatgtaaagaagtaggataaaagagcattaaatagtataatccctgaacaaacccttagtatatccaatgtcctacatgttagtagaagtctgtggtcttctaatgaaattgtagagaagccctgttttcccagtgaagtgttaaaaacgcgtataaaagaaacagtatttcctcttacacttatattaaaaacttttattcttttgatttatcttctttttcctgtaccaaaaccttcctatagacagtacgctggtcttttctttaggagtaatcttaaagagatatcgtgttggcgtattttaagttattctcgatgaacaggtttcttttgttttcggttttgatttattttattctaagttttcaatgattaattttttcaatcgtgaatagtttttattcacattatgtttgaattgattattattgattgcgtatcttcggaatggatttagtaatgagagatcgttaatgagattaatttgtttattgttaatgaattattatacggtttaacctttatttgttgaaaaacgataggactagaacgtgataatgggaggagagataaatgcatttatgttaataagaactcgtctggatctttaattagaacggaaagaggggtgtcagataacatacacatcttttaatttataatttgtaattgtaattgtaatttgtaatattaattgtaaataatatactacaactcactatcttttattcagattaatttcataatagctatattttgtacatggaaataaacttacaacgataactatttctcaagattttaactataatttgtaatttataaaaagagacattactcaaattaatgcctacatggttaactatacatttatcaatttaataccctttacacaaccagtgtatataacaactaaactattaacttaacgttcctttaataatttatttctcttctcttttctctttaatctttcaattttctttgcatgcattacacttgcaagtctttcatatctttcttgttcctctttcttttcacgtttttccttaattttagcaattctagctttttttcattctccttttcttcaattaatgcctttaattttgccttatcttgttgttcctttaattttaattcttgtcttttagcaaatgatgatttaacacctaatgatttaattctaaatgcatttttttcaactttccaatttttcccactaacacgtttaccctttcctggatctacaggaattacttcttcaatagtagctttagatactgtagacatggttattctataaaggaaaaattataaaaaagtgttttaaaagaaaaaaattttctaaaagattaaaaaattcatgttgcgctaagtaaaaaaaataatctatttttgagcccacttgaaatagttacaattacaatctttatcagtaagtttactttcattattattaccatcattatcgtcccatattcgatccttggatggtttagcacaacaccagaatttacgtcccatattggctccttttttggttgttcttaaaacacatggttcatcatgactacatgttggtatagttgatgaagatcttaacattgtattaaaatttgtaagtttagtagtgtcaggttgtgaataagacaatttttggacatcatcattatcattagcattatcattattttcatcatcagaatcttctgtaacaaacaatgatgattcattaattttggcattattagaagcagttttcttttgtaatactgagaataaagttgcttgatttttaggttttttcctactttcataagcaggtgtagtttgtgatctttttaccggggcagagagtgataatattatattaggttctggagaaggagaagtagttgatgctgatgatgattgttttgatttgaaaaaagatgcaattgatttaaatgatgctaaatcataataattcattgcttcaaaatgtttaaaattaggagtcaatgatgatggtgacgttgatgataaatttaatgaggatatatcaatatcacaataaactggacaatgatcagaaccataaaggaaattccaaatatcacaattaacacataattcttcaatttttttagttgataagaataaatcaattcttgaaccaatatttaatggtctattattcaacaatgtattccaacaagtatattttttcattttattgatatttttatatctacctaaatcgaataaaaatttattttcattagattgtaaattttcataatcatataaatatttccaaagtatagttcttgataatttattatttctaaaatcaagtacttcacttgcattaataaattcaaatgatttatcattaattttattagttattaataaattatttttaataccaattgcaatttcatcatctctatcaattaaacttggagaaatatttatatcacccattataattacatttttacccattttttctaaatttttaactctttgaaataaagtttcaatgaaaagacaacgagaagtttcttcaatttcattatttgaagaatttgcaggacaataagtggcaattataattaaattaattgataattcaacaattatacatctaccatctgaatcaattgattgaccaattttccaatcaattatattatcagtataaccaccaattgaacaacaagattcatcattttctttatataaccattcttttctataagtattcttagaacctttaattgttaaaaatccagttataccattttcaacttttaaaattttataattattagaattcttaatgaaaagggatacaccactataaccctttttagatattggaattgaaataaaagatttataatttgataaattagctaaatttttatttatatcactttgttgtaattttaattcttgaaatgagattatatcagcgttgaaaaaatctaaagatttagataaattatcaaattgattccaagggtgataatgatttaaagttttataaccattaatattaaaagatacaagtcgtatacaatttgaaggtggtattgatattgaaccatcaatttgtaccataattattgaaagaaagaaaaccacacatgcattaattacataattggtaatggtctctgtttgaaaataattctttgagttattacatcggataattcagccgcggaatctgttgtctttaatagggctaatggtggatcaagtgtttcaattgtaccaagtaatcgttgggaagtacttatataaagagttgccttgttggaattagaatcaatctctaatttaccaattttaacagtttctaatgtagtattagtattagtatcattagaagttatattattattaatatcaatagtagaagaatcgacgccattcgcgtcgacgtgtaatttttccaaaacatttggaattgaagtttcaccaaaaagggggctctcattagaaactgttggtaatgataaatcaccctgaatttccaccagtagtaaaccacgaggagtggtcagtagagatgatgatgaagatgatagtgtagtagataatgatctaacagcaggtgatacatctatatccaatactggcattgttgataaagagtataattgtataactaacacggtataacagccacagttgaccgaatatacaacaaaaacaggaaaaaaaaataaaaaaaattggaaaaatcagacgatagttttcctcactcgtatagaaaaccattactatacttattttatcggaacaattaagcaactccgggtgtactatataaatactgtcctatctcccatcccatgtgcttgtttgatgtaattattattaattaatttattttattttaattatgtctctacatttcttttcatatttgtttcttttaacatactttctctaactactaactcaatgaatcctgcaatttaccactcttctcgtcttcctgctcttttatatttatcaattgcaatgacaattcctttcatgttaccaattaaaacaacaattaatcaaaaagataaagatcatatcggtaattttagtgttggtaatgcttttaggatataaatgtatatattcctatacactcataccattctatcactaatctttactaaattacatatcatttcagttcattttatcttacctcttttatatcttttctcttcataacaggttttaataataaaaaattagtcattctacagggtagtatgacaattcatttaatctttttttttaattctataattatatttaatactttataatatactttatatgtatcggtctaaaaatatatacttacacacaaacacacatataaacacctataatcactcattatatcgtaaatgtaatgcattctgaaaatgtacatgtttaatacctggttctttactctccttaaatcctataattgcttcattaacactccatcctaatttctcaattaaataacaacaaattaaaaatcctgttcctattttgtccataatgacaatgaacaacaataaattgattatcaatatctctttccttcattagtttattaattatttcaataaatttaacaatagttaatattatctggtgtaactttactctctgttttatatttaatatatttaattctttggaaattctttggttcatatgatggtgtatctgatccaatatcaacaattgcaaatatttctggatgttccatctcaaaattaattggattatgaattaaatctgtttgtcttaatgttttcataccaagtaaataacttttaggcttatttggtgatattttattaataattggtttggataatgtaacaactttattccatttaacttcattttttaacccccatttatctcctgataaaattgcttttatttttaatacccatgtacaacttatattaatatttaaatcttcaataaatttataaataatcccacttataagttctggtttatctaaaaataatgaatgattacaattattaactttctcaaatttaatttcaatatcattattaccttccttaatcattttaacaatcttttcactctctgaaactttagttattttatcaaattctccacaacaaaccatcattttacctttacttaattttactagtcaaaattttcaattcttcctcactaacacttctgaaaccttttaaatattttaaaaatatacttgattcagtatctaaattccatctaaattgtgttaatctttttaatatttcatcaccgccatcaccatcatcttcgtcattcaatgttcctctcattattacaataaatataattattaacactaattgaatataatcctccaaatctatcgaaaaatctataataatcaaatattttagaattataacaacataaatttaaaaaccatcgtttactccaatggaacctattgaatataacctttctcttcactaactccaggtggtgacatcattataaatgatactactctaccattttctaaattattaataactttttgtactaatatgtgtacccattgaatgtgcaataaatataaatttcctattagggaatttataatctaatatttgttgaatcatatcagcaattgaatcagtttgataatcttcatcctttaataatttcaaacattcttctaatttatttaattcttcatcattatatttagataacatactaaatttaataccattattatttctacttggtctctttgaattaccaaatccaggtaaatcaattccaaaaatatcactacaatttctaaattcttttaaaattggttcaaattgtgatatttgaccacctaatccatgaatgaaaataattacaggtaatgtatcaatttccattaattgtttctctgcattacgtaattgttcagtatttgaatctttataatctttaatagatcttttataaaattctcttaatgggtgatcactatagatagttgcaagtgaaatttcattaatatgtgatctattattaattgggaatgattcaatttgtgaatatttttcaacgaatgaacaatcacttggttttaatcttaatatttccttttctaaatcagtgaatagatcattattccaatatttccaaagactaccagatattgagactctagttgtatcatcaattctttgtaactctttcaatcgaggtatggacaatacatccctattaatatactctcccatggtacttatactattataataataaattaaagagaaacgtgaataattaatgactctgacatgcactcagtgaagtgaagaaagattagaaattcccttatcgcgaacattaagaaaaggggcattacatcatgaaattaaggtggcttcacttttccattaatgagatgaggtttttgctcccattttctttatttatctttggctttgaggtctctgatttctcttttgagtggcaatggattcgatacaggggactcatcgtcatagtttagatactctgatggatttgacatcttcaaagttgtcaaaattatctaatatcggttcaaataatactattaatagtaataatgcttatctttccacaatcggctcggagtataataataatgattttaataataataactataaaatctctcatgtttctaatattccagttaaatcttttagttcaaggtataaacatcagaaaaaattaggttcaggtagttttggagttgttggtttatatgaaatgtgtcctggagtatatgaatcaaattatactgaaatgaaatcttctaaaggctcacttctttatcctttatcaattaattataaattaaatgataatttagttgcaattaaaacaatgagtaaaacattgaaaagaacttcagattattctaaaattaaagaaatgcaattcattttctctgttgattcccattttaatcttgttcaaataatggatgttttcattgatagacatcattttaaattacatattgtaatggaaacaatgcaacaaaatttatatcaagttatgaaatcaagaaaacataacatcttttcagctaaaactcttaaatcaattttattccaattattaagtgcaattagtcatattcataaacatttattctttcatagagatgttaaaccagaaaatatacttgtctcttgtaatgttaattattttggctcacctaaaaatatacctgaaaatcaaataattaattcttatattgttaaattagctgattatggtttagctagacattcaacaaataaaaagcaatttactgcttatgtttcaacaagatggtatagatctccagaaattttattaagacaaaattattattcttatccggtggatatttgggcttttggttgtgttgctgttgaatgtgcaacttttatacctttattccctggtgcaaatgaattagatcaatgtaataaaatgatggattttttaggtaatccaacaactgcattctataatcatgtcttgaaaactaataatatatctgcacaatcttttaaaaatcaaaataatgaagagattaaaccttttggtggattttgggatgattcaaaattattagcttccaaattaggtataacttttccaaatcattttggtaatttattagaaaattttattaaaaagaatgattttcctggtaatgaaagagaacatttctttagaatgatcagaaaatgtttaacgtgggatccaaaagatagagcaactgcaaatgaaatttttcaaatgccatatttccaaaattcaatttattcactaaataatcaaaaggaaaataatttatttatcgaaaaattataaaggctctgataggattaatcaaaaaattattaatccattaccaatatcaaatatgataaaggataattataatgataattatagatcaattaaaaatattcaattatctactaatccacatatgaaatttaatcaacaatatgatagaaattatattaccaatgatcaaaataatatgatggttaataatattaacaacaacaataacaataacaataataatgattcaactaagaatatgaaaacttcattaatggttgcaggaatttcaccatctaaaattgtttataatagtgataccaataataacagcatcgacaatcattatggatattcacaaaattcaaatttaaatctgaatctgaatctgaatccgaatttgaaactaagtccttataatcatcatcgtattaaaaattctaatgttggattaggagttattcaaccaactgcaatgaagttttcaagaaataaacaaattaataatcatagttatcaaaatcataatagtgatgatctaaataatatttcagtatcagatcaacttgaagattataataattttatgactgagccacctctcaatgatgattatgaaacttcattaaatcttatatcacaacttattgatgaagaagaaaataataatgatgaaaatatatcgaatggaaagattaaaaatccattcaagaaaataaatgttgatgatattgatgaagatgaagttgataatgaagatatcgatgaagatgaagatgaagatgacgacgaagaagatgatgaagatgaagattatgacgaagaggaacaacgattagagaaagaattattatcattggagatgaataaagttgctctattcttagaagaatctgagaaagattccaataatgaagtttatattcatcaaaagaacgaaaagaactatgatttaattgatgaaattgatcttgcattagatgaggagttaaccagtgaacatcctgatttaagttggagatatgaaaaataatattctataagatgttaattactttgctttactatatattttctatttaatatacctatttataaaatgcctaaataatcaatatttaatacccccaaaaatatgaagtttatttatctacaatgatacataatttttattatcacttatactatcacctacaggtcctacaataaattcaacattttcatcatctgaatcactcatattattatcattattattactatgttcatctttatcttctttatcatcattatttgaatcataaacaatactaacaacattatcattatcttcatttcttgtaattaatttcatatcattttcaattaaatcactattatgtaaacaattacaatcattaggatctaaacatctaccatattctttaacatcaggacaattaaatgaatgtataaatttacaatttaaaccagattcacaatattttaaacaagcaaatggacggcaaattggtgatgattgatcctctaatttatgtgtaaatatacaatcattatttgtacatttaccaatttgaaaaaatttacaacttggtgaattaaattgagttggtttatgtgaataatgacatgatttatctaaacatttatgatttttattactttgcattcttggacataatgcaacatgtgttggatcatgtaaatataaacaaaatggttgagtacaaataccatatgatgtataatatttacatggtaaattagccttattctcatcatgtttgctatattggtaattctgtgttagtataaacatattcgatattgagaaactttaataaatacttacattctacttgtttgttccatatgataattaccatttggttgtttaatatagtatttcccattatattttatatgagttggcattgaatatgcatcttcaattggttctttagtaatttcattacaagttgataataaacaaaaacatctatccatatgaattaaaacatatttataaccattaaagaaaaatctattatatgtacgatgatatcttctacttgataatattttttgaataaatggattattaatattaacttgtttcttcctatttggtaatcttgttaaattttgatttaatgtaacttttgaattaaccgataatggtatgtgatacttacgtcctgttggtgtgttagtaaaaattggttttgttattggatttgatggtttcttattcttattgattctattagttgttgaaaatttttgttcatttattaaagttttaatagatttttgttgtccatttttctctattaaacttttttgttttaattgttttaatctttcaacaagttctcgttgttgttcaacttgcccttgtaattttgataatgactctcttaatgctttttcttcttcctctactgactgattattcattactttgataaaagtaaggttaaaaatatgattgtagaagctttaaataaaaacgttgaaaataaatttaacgatatgaaaaacatgaaaaacttcaaatctgaaattcatgattcatgcattttcttctttatacatcttaacttccttcattatacaagctaaatgacatcatatacattaaatcagataaagaaatttggtcatgatagcattcaaaatatcattccattggatgatcaatccattgatgaaatggttcaatatgcattaagtacattcaaaacaagagattcaatgagtagtcattttgttgatttattaggaccgacggatcaaacatttgattttgtcggacaattctgtgatatggtatttggatccaacaaatcagttgctcatgaaaatgttccaaaagtagtgaaaactaaagaacctactaaacctattgttccaactaaacctaaaggtacaggagttagattagttaaaaagaaaattataacaactactaaaggcagaatgactaacaattccaaaaatggatcaactacatctgatatgtttgatttaaagccagctactgttgaaaaagagaaagttaaacaaaaagtgattaagaaaaagatagataatattgaagagttagataaagtattaattcaacttgagattgctaatgatgaaagaagaaatggtgatgatattaggatatgtaactgtaatgcaacacgacatccattgtttgaaatgtatcctaattgtttaaattgtggtaagattatttgcgaaaaggaaggattacaaccatgttcattctgtggtgcatcacttatgagtaatgaagagagagctgaaatttctgaaataatcaataaggagaaggagaaattagaggatgaagctaataatgtaacgaagagtacaacacaaccctctgtaagaccaaagaagaaaaatgttatcaaaatatcattaaataatactggacagaacaatttcaaagtacaagagaaatttttcaaacaaatagaggataaggagaaacaacgtaaaatagaggaagaggcacaacagaaagagaaagaacttataaaacaaaatcaagaagatttagaattttataaatccagacatcaaaaggatgaagaattaattaaagcagaagaaagattagcaatgttattaaattttcaagataatggagctgaacgtactaaaattattgatcatgcagctgattttgatttaccaagtggagaaaatggaggttcattatgggcatcaccaatggaaagagtattacaatttaaaagacaacaaaaacttcaaaatcgtatgagggaacaagaattacaaagatcaggacgtggtgcaatggttataaatgcggatattatgcaagatggacaattagtttatcaaaatggaccaagtaatgaagatattaatgttacagataatttatcagatgatgaagaaattacagaattacagagtaaaattaatgaagaaaagaagaaacaatttaataatgaagttaagaatgtttatgattattcagaatttacacaaaatttacataaacctatttacaagggtaatatcaaggaaacaagtaatgaagatagtgatgaaatgttatcacaaatgccagcattgggtactattgtgcaattaggtgatgcagaagaacaagaaaatcaattattctccatgattggtgtgtgataagcaatctacattgtattctatataatatattctacgtttataaatatataatacactatctctaatacaattaatatataccaccagtacctgatatataaagatcttagaaagacactgtagtgctatattaaagaaaccctcactgtaagtggaaaaagtttttcattgcgtgggaaaagtataaaaggaagagcatatctcctgtttgaaatttttcatcatctggatatttttcttctcctttaatcttttggttttcttcctttatcacatcagtagaggttatactacgtataatttccgggagagatacgtctctcccaaaaatagaaccatttgatagattaccattcagccattgttgctgtcttagggaaaatccggttttcatcaagttcagctaaatgtttgtcgacttgtctaacaaacttgtcacggctaacatttcgtttcaggttcttagagtgattgtatcgcgttagttttagatcgatgtttgttagttatttaatttttaaattaaatatatgccattcatccgactaattgtgtttctacattgtattattgtatcgtaattgtaattttaattgtaaatataatgaatttattttatctttaaaagactaagttagatacccgtcttccttattttaaagttgattttattattaatattgatattattattaataatgatattaatgttataaaaaaatttaatgttataaaaaaatttaatgttatatacagtcgtttgaatctatcgttacgtaaattataattggtatgcaaaattgttaaagtaaataaagaacttgataataaacttcttcacgttgatttatcattaccttgttgagtatttgatttaccggtatcattactctgtccctctgcatctgttttagccttttgaaattcttgtaaatattcaatttcattcttaattctttccattgatctataaacttttgattgaacataaaatgatccacctttttcctttgaattaatatcaaacagatattcatattttttttgtgctttatctagacttaatccacttaaatcaacatctaaaattttacatgcttcatctaatgttatatcaccatctcttgaagttgcacttgtctttttagcatttgaacctttttcacccttggttgcttgttgtgcagtagttgcagccgcagcttccttataagcctctgtaaaagctctaccaaatactttagtacctgtgaagataacttgtgctaataatctatgtgccatcgtttgttatctgtaagtttgaccaaatttgatatattataaaatacttaatcatgagtagttcttaattcataaaagagtcttttctctccaaagaaatttcaagaaattttaaattttccagaaagctcccgtcgcatcgtcgctgcttaggtaatttattactgattatgattaatgtaatcataattttctatttactcgtataaattgtcgtattgagtgtcgtataattttcactgcttttttacgatcgtacatagtctgtaaattaaattaatcctaataatacagtctgagataggtaatattcactgttctttagagacaagtataagttattagaccgagagaaccactccgttatcaaccgtatatataagtcatattactctcccagctgtaaattagtcaaatagtatttattatactattaattacaaaatatcccacattaatcaaatctttactaaaagactcaaatattaaattgaatgtcacaaaattactataccaatgataccaacagattctcaagatactgaagctgcaggtttattgatgctgttttcaaatcaatcaaagagattaacttcaaatccagtatctgaatcaatacctaattcaactcaatcagtacctgtgattgtatcaccaccaaccgtacctattaatacacaaatatctaataaaccagtcgatcaaaatattcaaatgacacgacgtaattcttcaatacaaagagatcatcaattacaaaataattcttcattattagattcaatgactaaatctcctggtcctgcagctgctgctttagcaagtgaaaatggttcaaataaggcaattgtagccgctgctgccttagctgctgctgctgcaactccaatacctattatacataaatcattacctgaaaatggttttaaaatcaaaaaggaaaaggaagaagagaaagagaaagagaaaggaaaggaattcacagcaaataatgtattaaaacctggaatcagtttaaaatcagataataaccaaagggatgaaaaaagaggtagaagggaagaaagatcatcatcacaaaatacaaataataaaaggaaacataaagaatcaatagttgaacctactataccgtcatatgctgtaggaccagattcgggtattataagttgtatatgtggttatgatcatgatgatggattaacaattcaatgtgataaatgttttagatggcaacatttagtttgtatgggattcaaatcaattgatgatacacctgatgattttcaatgtaatttatgtaataaaaatttacatgttgatgaacaaaaggctaaaaaattacaattaaaatttttaaatgatgaaaaatctaagaagaaaagagattcaaatgaaaatgttaaagataatacaaaaaataatggaattatacaatttaagagaaagaaaactgatgataattcaaatgaaataatcggtgttaataaatataaatcattatattatccaattgattattatgttttcaaatcttcttcaattaaatcattaattaatcaattaccaattatattgaaaaagaataatgataaattaattccaatagttaaagttgataaattcggtttaaataaattaccaattaataataattatttaaatattaaaggaccaactgagaatgctaaggcaaaattttgtggaatttctaaattaggattattttctacaaagacaattaaagaaaatagttgtatatcattaatgacaggtgaaattgatacaaagccaaattatataatggataaagttaataaatattggatattaggatgtccaaaaccaagtgtttatttccatccaaatttgccaattgttattgatcaaagaggattaggaaattttacaagattcattaggaaatcatgtcaaccaaattgtgaaattaagacaataattagtaataaaaatgaaatctcatttggtatatttacaacaaaagaaattaaatctgaaattgaattaacattaccatgggaatgggatgataatcatccaatattaaaattaattaatgaagatgaagaaaattttgaaaatatgaatgattttaataatgatgataaaataactataataaattcaattttatcaatattagatttaactgaatgtgcatgttcaaattcttcatctacatgtattgttaataaaacaaaaaaatattcaacttatttacaaagaaattcaagaaagagtaatttttcaattatttcaccaactccaaatcaaaaacatataccaattgaacaaagatttattgaacgtgataattatattttaaattatattaaaaatagtaaaaatgaaaatgatgatggaaatggtaatgttagtgatgttaatgaagttgaaataaatggtgaagaaactaaagaagaaagagctcaaagtaataataataataaagatgaaattgtcattgatgatgaaaatgatggtgatgattcaaataagtttgtcttcaaggcaaagaagaaaagttctttatacaatcttcatattttaccaaagcaacttgaacttttgaaaaaatataatgaaattaatgataataataataatattaaagttaatttaaccaatataataattgataaacagaatggtgttagtagtggtagtgaagaaattattaatttaccaattccagttgaagtaaatcctgaagtgttgaaaaaaatagctcaaaaaactccaacagaaatgaatacatcaattgagaataaaaattcggaaactgaaaataaaaagtccgtggaaggcattgaagagaaacctaaaattgttaaacgttttagtttggcagattataaaaagaaaaaaactggttagatttacgtaaatatacaatttctttaataccttttgtaaaatttgaaaacagaaacaatgccaaaaataaagaaatatacactgttgccaatgcctagagaaattggcaatagaaatagaaatggaaataggagaaagttctcgctgtgggttaactttaggagaatgaatatgattcaaaaaaggaacaaacaaagcattgcaaaatttactccatttaatcatagggccctgacagttgaataagtatatacggagttgaaattgagaaaagctaaggcatcatctgtagaaatttataataataattgtttaatattattatgtattatgtcaaaacgtcaaattttcaatggaaaataatttttccgaggcttaactgtaatggttgtgtattttatttcgatttcgatttttttgtggagtttatatgaaaatatattgaacattgactatacaaattattgtacaaagatatataaaagtaaaaagtaaaaaatagctgattaacgtagtaaagagtgataatatatataacaactgtgaaagtaactaattaagtaaacttttcactgaaatttgtcttgttgttggatgaattttaattgaatttttataattgatattattaatacttaagaatggaactttagattcagttgtagtgttacctaaaattgatgaattattattatatgggtatggtgataatcttggtgaggaaattggtgattcattatcacttgaatgtgttgaatctgaatacatttcaggttgtgatggtgatgatggtgccattattggacttgtaattggtgttgaagatcttaaagggtataatgatgaagtatttgaagatttcatttctgataatgcaacaactgcagctgctgctaatttatcagatttctttaactttcgtgatgcagtagaagtggaacttgcgaatgatgaggatgaagtaaatgtagttttctttaattcttcctcagttgggtaaatacatttaagattatttcttaaacaacctgaacaagcaggtttcctttcatcacatttcttctttctctttctacaacagaaacaaccagttttagttcttgtaatttttttcttttgctttacaatttgatttgttgaattaacagttgcaccagattcagtagataactttattgcagtaatatttgcattatttgcacaactcaaatcattattattatgagatgatacattacaagttgaatgttgttgtttcacttgattcttttgagataatgaagcgagattaataattttttgatattcacgataatttgtcattttcaatttaacgataataaccttgaataaagaagtttacaaaccaaaggtaagaaaaaaaagagacatgcaataaattgtgaaaacttttaattctcttctcctccttaaatgacacatactaccacatcaacaatttcaaccaatttgtaaataataatagactcacaattgcacggacttggaacaaaatattttcctcaaaaattggaaaactcttctcatcactagggcgctttgcctatttaggtaatttctttctttccttctcctagccgcgctcaccttttcagcatctctttccgagacacagtcgtttttttggccatttttcgctgttggcttcttttttggtatatgcctcttttttggtggtgttatttcgctcttgatttccctaaaaaaataggtgccttgccaaagtgaggatgagtcaataaatggatcatttttgcgtgtttaaaggaaacttataacgagtagttgcttttatttgatattgtctcaaaatggactgaaaaaagtgtcttgaaatggatacagtactttttgattacataataattgatatcactgtatagtgagtaggataaatacaaacaattagaaataatagtaatagtaataatagtaaaaactttttaaactgtaataaaaataaatataaatataaataaactgtaaatgcaaataataatagtataataaaaaatagtagtataatatagaaatataatataatataataatgtaataaaaattgtaataaaaatgtaatgcaaacttcaatcaagaagaagctaattcagtaaaatattgtcttaaaattaatgataacatttcaggtaattcattaatatgatgaacaacaacataaaattcaaatgggaatgtatccaaatatttagtaacttgtaatttcattttaccattatcatcagttgtataatttgcttggctcatatctaaaattgattcttgactatttaatccatcaataataacaaaaacaatcatgactttttcttctctagcttttctaactaatctttgaatagtttcatgatcttcacagacaccatcagataaaataatttgtaattgccataaatctgcatctccaaatgatcttgcttcattgaaaacttttaatgatttagaaattaattttttaatatcagttcttgtatcatcaaacttaaattctctaaaagcgttaatacctgaattattaccaaattgcttttcaaatggatgaacaacttcagcctttgtaccaaatttcataatagatatttgaccagattcaagttgtgataatgctttggaaactaatgcaacactctcaaatgcaatatcaactgcatgggattctgccatagatttagaatcatccaatgaaatcataatttgatattgtctcttacttggtttagttcttctcatccaaatcttatcctttctaaattgtgatgcaatatatggaataattctcttcatatttaatctcttacctgtcttataatcacctttcaatttagttgataatgtaggttctaagattaatcttaattgttcgcataatgatgatgttaaatctctagttgattcatctgccttactccataattcttctgcctcttcatatggtctaacatttggctcattagtttcactttcaccaacaataccatcaatatcttcttcatctgataatgagtcttcagaatcaatatctatatccatatttaaattagttggaatttcatcaacttctctgttacgttcattcatgaatcctgaacgtttttcaccagcaaaatcatcattcatttcaccatcttccatgacaacatcctcgtcttcttcattcttggctaatttattttcagattcttcttcttccgctgttgatttattttcatcaacaacttcatcttcttcttcgtcatcaattgccatatcatcatcaatagattgaatttgatctttattagcagcacctaatgcttgagtagtctcttcagcattatcaccttctaaatgttggaattcatcaggtttttctcctgccttctgatcaaccatatcatcatctgttgcttctttgatttcttgtcttcttctatggaattcttttaatgaatcacctaattgtttcattgattcagctgcttgatctcttgatgattcattttgctcagcattggtatcttcctctttctcttgattttcctcattttggaaatcagccccaccattgcttgcaccaatattatcattttcttcattggcatctgcatctgcaccatcagctttaacacctgactgttgcttaactgcagaatcatcatcaacttcattagcaccagattcggtaccttccaatccttcaatttcttcatcatcattcttatcttcttccatcttatcttcttcattcttattatcttcctctccttcttttaattcttcctcttcttcaactccaccttcttcattaataccttcattatcaacttccataccatcagtattttcctcttcttcttcagcattatcttcctcaccttcatcatcatcatcagctggggcaccttcaacttcttcattttcttcttctccatcgggttcttcattatccatttcaacatctgcattttctttatcatcacccttaccatcttcttcttctcccatatcatcatccatattatcttcaaatttatcatcaccctcttcttcttcatcagatttattgtcaccatcagaatctaaattaatatcatcaggtaattctaatgcatctgcttcaggtgctgtattatcaaattgttcgttttcctcatttttaacttcatcttcttgttctccaacatcttcctcttcaccattttcgtcattttctttttcttcttcatcccccttttcatcattattatcgtcttctggtttattattatcttcattttctttttgtttatcattttccttttgatcttcggcttcatcttcctttgccttcatatcatcattttcttcagagttatcaggcatttcttcagattctttttccttactattagatgatgcttcttcatcccacatcttatcatcaactgcgttaggatccatatcatctaagtcatcaatttcctcatctaattcttcctcatctttatcttcatcatcttcctcatccttatcttcttgatctgaaacattttctaattcacctgccatatcaccttcaatatcaacagcatcatcattctcttcttcttctttatcgtccctatccttttcttcatttggttgttgtgcttgttcgcttaagtcctcgtcatcttcgacatcattagaattattttcagcaccttcaccatcacctaaaccggtaccatccttcaaattgttatcttctttctcatcacttggaggatcaggttgacagaaacctttggaacaaatagtatgcaacattgatgataattcaaatgaacctcttgaaatatcaatatattgagttttcaatttatgttcaataatttggacgaggttatagtagttttgaataattggtaaagtatgttcaataacagcagaagcaatagaggtttcagtttcattcaatttgagtgattgtaaaatagtgaaaatattatttaatttctttgaaactgaagctggatataatagatcaacaaatttattcaatttcttttgggaatcaattaaccagttcttatcatcatcttcttcttcatcttcattcttttcaataacttcaaaattgaatttgtgtaatctttgaatagagatcaaaatagcattaaataattcacggaatgatttttcaagatcttcaattgtaaataattcttgtttaacatcagtagctaagttgaattcaaaattttgaatacttaaccattcaagaataaagtcggcaacaaatgctgcttcgatattttcttccttccataaaactaaatttgtaacaaaatttttgtaaaagacgctaagttcctctacttgttgcatatcatcagaacctaaaacttggtaaattgaaattgaatatttattaatagtagatttagcattattgaaaaatgaactattatgagatttatttgtgaactgagaaattgttcttaatgtttcacatgcaaaatctaaaactgttggtgtttgttgaataaaattgatgatgtttttctttgaattttgtaattttgataatttatcagctgataataatttattagagttgtatgtagtaaaagtttccaagtttgatagtttatcactcaatgattcgttaaattgactgaatctaactaaaacatgtctattcttgaccaaactaaagagtaagttttcagacgcacataaacatttttgagcatctccaggatgaatatctggatgaacttcagaaacggcgagtctgagtcttggaagtaaatctaaaattctaaagaaaaaggtgtcacaacctctgaatgatgttggttctaaagaagttgaagtggctaaaacagcagtagcggttggtaaagctttttgaacatcaacagtcatatgtaatttcaaacccatttgtttcaaatctttaatagtattacttagcaacttatgcttttcgtttttcaatgaggcaataaccttcttattttccttagtatggactgaaggtgtttcctttcttaaactttcagcatcttcaataatttccttggcatattcatgtaaacttctaaatttaattgattttatatcagcaatataaatattcatattattttcaacttgagatatattctttaatctagagtttctttcattccatgtagaaatttgttgacataattcattgatttttgacatatcttctggtaatctaactaatttagattcaatatcaggtttatcaatatgagttttaacagaagaagcaataccagattctaccaaaggtttaacaggtttaactaaacaatcacgatactttctaataatgttgtataatttatgatgagaacgacgagaactttgtttcaaagcatcaatattaacatccttccaacttgctaataagataatttcattgaccttcttttctaaatcttttttagtgtaagcaatagcatcattaatttgaggaacaaattgtttataataatcaacaatattcattaatgagttgtagattggagaagttggaactaataatttaacatgtgttgcaaatgcacataaaagatctaatctgtagctaaactctccgtatgtagcttgtgatacaaaaatgttaatagcaccaatgattttaacttcaatttcttcatcaaaaacttcatcatttattgatggaacaataatactttcaaataggtaaaaccaccacttaccaattttcttttcaatgttattttcttcattgacaaaaacttgtttccaagaagctaattctaattgtctccaagacacaattaaactagaaacagatgcataatgaaccttcaatgacacacctgaatgtgcatatttttcccattcagcaatgaaagtaaaaatttgttcgacttttgcaagtaaacggaaaattggtgttgatgctggatattcaaggaattcagaacaaattctaaatagatcagataatgttgcatgttctggccatttttgtaataattcgtgaacggaaatttgaacatttctaataactttaccagcagctcttgtttgagcaaaatcgtaaccattataaaaatcaatatcagatgaaggtttaacttgaacaaaatcattgtaagaatctttgagtaatgataaaataaaagttaagattgatccagtgttattacctgagcctgattttgcagaaatctttttaatagcgttaaatgtagttaatgaacttgtagagatatctttgaatgaggcagctgagtttggttgaaaatttaaaacataagccttagcaatatgatagtaagtctcatttaaatcaatactagaagagtgagtctcagtagcacctacatccattaattcatcagagtctgggaataacttcttgaaatcttcttctgcatccattgtagggtcggagaacttaaaaacaccgctttcggtagattctttttcttgttctttcaacattctaagagaccacctatagtaaagcgccattaatattttattaaacgaatcatcagcactaccaacttcagtaggagttttgtaagttttagataaaagtaaaagatgagagtaaatgatttcaacattatgatcttcaactgatgatttcttacacatcttttgaacagaatcagtaactgaatcaatttttgttgttgaataaagaaatgcggcatcagcagtccaaagagaggatggagttttaatttcatcaaccttgtgaccgtcatgtaataaatgtaaacctaatcttaaagcatgaatgaaaccaattaaaatgtcgtttaagtctgaaaatttcaaatggttttcctttaatctcaaaataaaatgagaagaattcttgataaagttgtcaatttgagaatcagctttatctgtaacttctttagcagtttcaagtaaaaattcaatatgttttttatccatgtatgaagagaaaaataagtgccattcttcaaataatctttcagctggttcagaatcacggaaaactcttggaatttcattaatattattttcaggaacatttggtaaatgattttctgcagtgataggagcatcaccagaaaatacagcacgagcttccataaatgagcttttgatatcattaacaacattttgtaatttaataaaatcattgtataaaatatgatcaaccgcagctggatcgtaagcagaattaggcatgtataacataataaaaccacatgatgtaagaatgaagcattcacccaaattcttcattgataaagctttctttgataataataaagctggaataaagtatgtaccaaagacttcagcatacgcagaacaaccggattctgagaaaagtctttgatattcagataatgattcgtaagtaccatcagtgaacttgacattgacttcacctctaacttcctctttttcaatcaacgcagcatggatgtcatgcatatatttaatccattggataataatatcagaaaagtgtctaacattgtcagcaagaatatctggagattttttaatgatttgggaaataaaaaattttaaatcaaacaatgtttgttcaatattaccaccttgtgtcttttcaacttttgaaactaaatccattgaagatttaaaaaatttgtcgtcaaacaatggtatttctaaatcaccttctggtgaccataatgaatttaaaatttttggatatggtttaaatagttcagtcttttgataatcaactgaagaaatggtagttttattagatagtaaccataaagttaaagtttcgtggtctaataatggtgcttgttgattgtaagtttgattagcttcaacaaatccaagtaattctgcaaaattattagcaaatgaatgagctctttttgataagaaattggtggagattttagcaagatcttcaatcttatctttgataacttcaagcatggaaacaaaatcatcattttgagttttttctaaacatgcaccaaataattcaataaacatttttctgaattcattaacattgtttacattttctggaaattgttcaaacgcaacttcatcaaatcttgaagctaatttcattaatatttcgtagttctcccaagcaacagcagtttgaggataaattgatctacaagcattccaaatcaaagtcattgaggaacctctagtaagatgtaaatcttttgtgaattcagtaataataacacctagctcagaaattaaatttgcatcaaacttctccttttcgttttcataccatgaagaaagttgttcattgtaaaccctaatagcagtatgatttatagaagttgaagcagaaaccaaatttctccagataaatagaagatcaaataaagctctgaaacattcatcattcttaaataattcattttcttttaaaagggctaaggtttggtttttgacaaatgttaaaatattaataacatacttgtagacattaagttttggaagtttcttgatttctctacctaaagataccgctgctagttgttctaatggattcaaaactgacgcattagcagtttttgctttttcgtgaagattattcattgaatcaaacgcatcggaaagaagtgaaatgacagtaaataagtaagaggtttcagtagaaattgcaaatggggcataatctaatactaatgagtgtaatgaagtattgacgattggtgataatggttgtttcttaacatcagaaaaccttgaattttgaaggtattgagaagattgttgaaccttttgataaatagtagaaattgagtcaataacccctgattctttcaaagtttcaaatttgttttgaatatcaataaaaaacttggtgttttgaaattcatagtaagtacatgcagatttagataaatcaaaaatcatatgaatcaaatcaattggaatgaattggaaaaaaactgaagatgcaaattggttgtttgaatcacacgctcggttgtagtagtctaagaataaagcaacggaaacagattcactatcattgacattaacataattagcaagtggtttacctggagatttcaattgtaataaatttaaagttttatcaatttcttcaacattttcgattgttggttgaatgtttaagatcgacttgtccaaagaagtggctctgttttctaacttatcaacaaatacttcaaccgatctatttctcatggctctagatagctcaccatatttaggatcagaagtcatgaataatctaaagttaggatgagttttaataacacgtggagaaccatcatcattggtacattcattaataatcaaagaaccattgttttcaagtaaagaatttaatctatccaaaacggatggattacaaagatttgcattatctaaaattaaccagtatcccttttcaactgcttcaacaaggagaccatcaaaccattcaaaattcacgttaatttcatttgactttaatgtcttcaaattattaattatagccttgatttcttcattaccgacagtctcatttaacagttctaattctttcaaaataaactcaagatttaaatgagtaatgctggattcgactaaagttttaattaatctggttgtagtttgacaaataatagaactttcagtggaagataattggaggttaatggcaataatatttaataaaagattgatgatttcagaggcgtatttagaaaatgttctagtgtaatctgcttgttcataaccacctaaaatatccatactatcaatatcactgttcatagaaaattcataaactttagaaccgataacatcagccgcaaatttaatcaaattagatttacctgatccggattcaccaactaaaattaatggatatgcatgttggatacaacggaaaatagtttcaagaattggaacatttgattggatgttggcaattttggaatcagattgatattgaatcaaatcgtttctatcaataattgtatgctggcattggatacaatcagattgaatgttatagaataaatcttttgtttcaactggaccaataatctcttcaaataagtcaattgctttttgttgatctttagcagttctgaatctttgtttaacaactaaattaaagaagtctgaaggtgataattgtttggaaaagccttgtgcttcaactaatgataaccaacgaagagtatctcttaagttaaattcccatggtgcaccagaagacccccattgttttttaattacgacttgctcttctaacttggacatgaataaaatcattttatcacaaacatctttatctagttgaggatataaatgatgggcaatcaatttaagatcttcttcaataagcatatcaacgtagacaacactgaatctgttgataaatgatttaggtaaaccttttctaccaccaccttgtaattgaggattttgtgcagcaaaaactttaaagtttggatgactgacaaatgatttgtctaattcaggaatataaacttctcctctatgatctaaacaagcatttaaaccttctaaaactgattgagatgctaaattcatttcatcaagtaaaacccattcacctttttgcatagctcttaaatatggagcatctctccaaacaaactcaccggccttaccaccttcaacaggagaatcagaaccaaataagtcaattaaatcagtttgttcagataaattgatacgagttaaattattgccagttgcttgtgctaaagctgtgatcaatgaagttttaccaacaccaggactaccttctaataaaataggtttgtgaacttgaagtgctctaataactctcatagcattggatgcagtagttggtgcttctaaattaaatgatgtgatatctggtgcctcgttgcttctttctaaactaaatgggccacatctgagctttgagcctaatatttcaacagctgattgctctgaataaatttggataagatcgtgtttagcaaattcagataactttctaacatattcaagtttaacagctcttagtttttcttcattttcagctaaatatgcagtagtgtgagtacctaatgcatcaatgaaaaccatacaagcaccgtgaagtaagcatgccattttttgaataccattatcataagcagtgttaatgaatgtaatccaagcaagaatatctcttaaggaaataacaccggatgaggcatcacctccacccatcttaacaccataccatttggaaaagttgacaataacatctgttaagtccttgatatcatcatgaagcttagctctaacaatctgtctaacatcttcaaaatcttccatagatggaacccaaatttcagtaaaacgatttcttaatgcaggagataattcctttttaccgtaatccccaccgggattcattgttgctaaaaattgaaaaccttcttgtgcagtaatgaaaatatcatctgaacctttttcagctaataataaagatctttctggttctaaaactgagtttaatctttctaaaactgaatcatcagctaaagaaatttcatcaagtaaaaagtaactacctgttttgagagcattgactaaaggaccatcactccattcaaataaagcatcacattctgttttgactttgttcattttggttatgttttcttcagaaatactctcatttcccttgatagtattccaaaaagcgacagcatcggtatatgagatttgatcatcgatgacaatgtctgattcttgagcaagttccttcaaacattcaacaaatttgatttgaagttcggaacggtttctgataggtctttgtgcacctaataaatcaccagtttcagtattttgatgagcattaacaataattaaatttttgttaaataattgagcaatcatttgacagacagtagttttaccacaaccagtttctccaaccaaaagaagtggttcattattttgcattgaagtaataaccaaaacagctaatcttctcattgcctttgtccagataacagggcctttaagttcaagtaattctttaacttctaatttagaatagtaatcactcatatcaagcttgactctcataactttttctaaagcttccttaacaacaagtttttcttctggtcttctaactctttctgctaataacatataaccattagcagctaattgttcataaccaacagcttcacgttgagcccacctgaaaagatctcttaaagtagcaaaagaattcttttgttcaaataatctaccaccttgcctggtgataccaagttccttatacacttcaacaatttttttagcatatgttggtgcaatcttacatctttctctaagaataatttcaagttcatcttgaggaatatcatcaaaatgtaattctaaaaatctatttctgaaagcttttgacaaaacttttctaccaccgtataacccgggtggattttgcgtagcaaataacataaagtcaggatgtggtctgactatttcttgtgtttctggaataaataattctctattatcgtctaataaacgatttaaagcttccaagacatctgttggggcaagatttaattcatctaaaacaatccaatgaccttttcttaaagcttcaactaaaataccttctttaaaaattaacttaccgctatcatcagagacatatgtacctaaatattcttgtaaatcggtgtgttcatggttattaatacggacaaatttgtgacccgttattttagcaagataattaatcatagatgttttacccgcagatgttggaccttggataagaactggaaacttaccaccactggtagcacggactaagtttaacatattcttttcaacaaaaggggtaataatataatgagcttgtggttctggttcttcaggacctttctgcatccaataatgtttaaattgaatatattgggtatctttagaagatggatcagcaggaatttgttttaaaacagatttttcattctttaattttccaacggtatattgatgaattaatggtaaaagaatcttttcagattttgcatctaataaggttaaaagtgacatacagaaaccttcatataatgatcttcttaaaccgtaaatagaagcaatatcacgagcatataataaagttctagttagtgtacgaatactgaaatgtggtttttgatttgcaccatcaacaatttgattcgattcggaaagtttctttgctgctaaatacaactctgcaatatcattaccaatccattcatcagaaagggaatatttaccaatatatttgtcaataatcattaataaatcttcaatatcttgatctggagaagcaacataaatttcactaaatctggatcttatactttgaggtaaatctttcttaccaacatcagttgcagggttcatacaaccaaagatacggaaatcaggatgtgctctaatactttcaacatcacccttttctgataaaagaacacttctttgagattgatattcagctaaaagatctgatatactatcaagggtttctggtgctgctaaattcatttcatctaataataaccaatcaccttttttaactgcattgactaaagaaccttctacaaatttgaaaatgaaggagttattcatatcaataacttgtttttcaaaattgattactcttgcttgcatggagttccattctttcattaattcagttttttcatacgcattcagctttctcttctttttctttgcaggttcatcatcattttcagcagcttcagtattttcagtttcttccttttcgaatgtatttttagccattttataagcttctttccataatctacaaacatttttccattgagatttgttaaaacattttgataaaagttttaagaattgtgcattatttttagttgagaaagatcttgcaaataactgttcaaaatcttcttctaatggtaaagcaattgtctttgcattaattggtttgaagccaccaagtaaatcaccgacttcggtttgttgagataagttgatgacagttaattttttattaagaagttttgccatttgttgaacgacagtagttttaccggtacctgtttcaccaacaagtaaaagcggttcacacattgagatacctacaccgattttttccatcaatctagctgaatggttagttgttgcaaatgaagtggaattaccaatagcaactttattgttatatttatgaacaccgataatcttttgtttctcaacataagcacgaccaactctgatggaatcatcaaaattttcaaaaaccggaacatttctaagaagttgtaactgtattcttgaagttggaatttctaatgattgaccaatatcttggattaaaaattcaattggacctttttcaacgattgcacttgtaaaacaatctattgcttcttgaaaaattaaatcaaatacttcatcttgaatcatatcatcagatgatttaatatcatgtagttggaaaatttgttcacttcttctacaaaatttcattaaatctctgattgaaatttctcttggttgagcacctttattcattgaaacaaatttacgagaatcgcaaattttcttaacagcaaaataacatttaataaataaattcgtataacgacttaacaatgggaattttttatttaaaatggtctttaaatcagattcttctagatcttgaacagttaaaatattccataaacgtaaaccaattatttcaggtaaatgaatctcaccctttttatcaggtactgatctgattgttgagataagttggaaaccattagcagctttcaaaacttcacctcttgaaggtaaagtaatttcacgatgttcaagtaaacccattaaaattgataaaacttcatttggtgccttatcaatatcttcaattaaaacccatttaccttctttaacagcggttgttaaaacaccatttttccactcgaaagtacctggtttagaacctgatgtataagtacctaataatgttttagagtcagtttgttgattaagatggattttaacaagactgttagtttcttcaatatgtaatctctttgccatttcatcgactaaaaatgttttaccacttcctgcactaccaaccaataaaacgggacttgaatttttactaaatttagcaaaatctcttaatgcatcaattgattttggaacatcaacaaaattagattcataattagtaaaatttacattagatttaagagatatcaaatttggaaccattataccggatataacactaacacccggagataagtcattttcagtaaatgtaattgttgaattagtttctttgaagcagtaatctgcaggttgaatcttggataagtttgataatctttgtgcttcaaataaggtaatgtatttaaaattaacatttttatcaccatccaaagttccaactaaatttgaagtattgacatgttgttgaatcatttgatttttagcttcctctgaaagaaagaaatatgtggataaaattaatgaagtaatatatttatttatatcattagaagattcttgtgagagaattgaatgtaaaacttgtgcatcaataaatgaataaaatttttgtctatcaaggttaattaatctataaaatgccaatagtaaaatttgtaattcatcttgagagatagaagctaaacagtttttcattgaatggaagaaatccttggattttaagaaatgttcaactaagattgcaatttcttgagtgtaagtcataattagtgctaaacttgataaagtttgagaaccttcaataacatgatgtaaattattttcctttaagtaaagtctttcaatttcttgactgtgaatcaatcttgcgacaagttctataataattggtttaaagctaaataaatcccatgtagttgcattgttgtttaataaatgtgtacttaattgtattaaattttcttgatttgataacgctttgttaaaattgttaaatgcaggtaagcatttctttgaataaaattgttgaaagtttctatgaacttccaatgactgtttaaagtcaacaataatcgagtttccagttgatgacattattcaatgaactatatgtaaaagttagtaatttgttttctattttccccaaacgtgaaaaattttggatattaaagtttaaataaaattttatacgtacttcaacaataaaaccgactaataagataacaaaaattaagacagcaattaaaattggttatttgttgtcaaaataaagtttgttttgttcaattaagatgtataaaaaggggtatattagaaacctataaagtagataatataataatgcatcaaaccgattttctctattaagaaaaaaaatttgcatgaaaaaaaaaatttttggtgtgcacagtgattatgtcatcacagacatgtctactattctagatcattgaccatcttctccacgttccttagtccagttggcatcaccgctttggcgtggtagtaaatcatccttggtggttgcagctttgattttctttttctctgcttttttctctgctgttttcttagcatcagagactaagctggatgtcaatctcatgaactcattacgatcaatagttaccaatttagtggcattagtaatagctaatacggcttgaagatgtttatcctgttctttgtctattgccaatctcatttcaggtttatctggatttatatacttatcagttacatcaataatgtatcgattgttagctgcgaaaacatatgacattttcttaccccatccatcacaatataacattggttgatcatatgaattctcgcatgaatctaaatggatccatctaccttgtttcctactaaaatactcacaccaaacatgatcttccatatttctaatataacgtgattcaatatccaatgaacgtaaaatagagagaaagcaattattccattctccacatctacctctacgctcccttattaatgtttcagctttattatatcttgcaaacacaattggtgcattacattttaagcatttatagatctcaacaactgatgcccacccttcaaggtgttcctttctaaatgcttttcttgcctgcagtcttctaattttattttgatcactattaccacacttgtcacaaggtggtttattaacccaggtaaagaattcttccttaaaccatctaagaagttccttcactaaatgatcaacataatccagttcatcatcttcttcacattctttctccttaagggcagcacgatgatgaacatctgttgctaaaacggcatccagacaagcattcttatctgcatccgataatctataaaatgccaattctgtttttaaaatgtcttggataaatggatatttttgtgcttgttttattgttggtttgtcagttataacatttttgtaaacttctgataaaaaagtaattctccctttatatagtgtacttggaaaacgatttgctaatctcagcattttagtacgtttttcatctggttgttgtttgaatgtagtcatgcctacaaagcaatgtagtgtgttgtgctcagagttgaaaggaagaaataagtggttgtagatcaaagcatccctctaagttaacggcaaccgccccatgaaatcatcccaagccgcgttacgccgactttttatctgtcaaacttcccccgttattcatgctttcttcaacaagtcgtcaagtgaaaaggtacgtaggagcagttgctggaactgatatatatacggaataataatgacagttgggaatagcagaaggataaaacttgtgaatggttttgcaaataatggaaaagaatcaaaaatgaagaatttagattttgatattctaagtcccactgaaactacagcaattgatgatgatgatgatgatgaatgtgatgataataacgatgatggtgttaggtgccaatactctgaaaatctgaaaattattggatattcgattattatattaacttgggtattttttgtgatatccataggtacgatcctcaatgtatggcaatggtgtttcaaaatacgacctggttatatacaacaattacaagaaatacccatattaggagtgatagtcaataagattattgaacaaaatcaagttttggataactactatatgtttgcaattatactaaactttgtcatattatggatttgggcagtagcttcatggattagtatgaagcttttcagacatagtaaaggtggtggttcataaaatcatttaaatcgttctatattatatatttacaagtattctataatttctatatattcatatattcatatattcataaattcatcaaaagttttctaaatagcttttacgacgtagaactttttaccagcttttaatagtaataacttatcttcaattaaatcatctgcctttatgctatagtctgaatctgtgatctttccctctttggtattgccgatgtaaatagatccacctttgatcattctcttaagttcagactttgatttttcaccaccactaacttcgtgtagtatattgacaatatttgtactaaataattgttccttacttaaatttttaacaagattttgctttgcaaaggcatccaatacatcatcagctttgaaattacctctaatatcatttctactaaataaaatctcactgataatgtaattacttaagccttcaccatctccatgaatcaaatcacacatttcaattgctaatattctttgacctaatctaacttttttgtctgtattatgaagatcaataattttatcaataatagtagctggcagtaaggaaaacttgtacataaattttttaatgtcttcatctgtagtattatacatgaattgataaacatcatatgaagatgtaagttctttatcaatgaaaattgcattacctgcacttttaccaaatttgacaccatttgatgtagttagtaatggtacagttaaaccataaacttcattttcaaactttgattcttcaactttcctcattctattaattaaatcaacaccagcaactatattaccatattgatcattaccaccaacttgaatatcaatattaaaagttttattcaaataataaaaatcatatgcttgtaaaatttgatatgtaaattcattaaatccaataccttgttctgatgttaatctattcttaattgattctctactaagcatttgattaactctaatatgtttaccataaattgctaaaaattcaagcatacccatattttgccaccattctttgttatttttcaattcttgactacctatttgtaaattattaatctctggatttctagttttaccatatttaatagcattgatgaaaaaatttaaaaattgttgagatatacgttcaatatgatcttttctaatatcatctctcatacttgatctttcagttgatctacctgatggatcaccaacttcacctgttgcacctccaatcaatgggtaaattctatgaccacgtaaattaaaatggagtaataccatcaatggtaagagattacctaaatgtaatgacttagcagttggatctgcaccacaatataatcctaatgatttagtttcaacgtctttacttaatcgttcttcgttaacacatgtttcaattaaacctctttttctaagatgtgaaattaatggttccttgaaatcatgttttaaatcatcttccgttatctcaatattatgttttgtcaaaatatcagaaattgaaggtgaaattcttgtaatgtttcttctgaaaactgatgcaaaaacaatattctgtgttcttttaatactgtgtatacttctatatctaagcattgtgttagtcaacaaaactcactatcaaatcacaaaagaacctataattgttgatgtgcatgatttcactataatacttagtccttgatgttgaaaagctaaatattttgttacgtaatctctaacattattattacaaggtttaatttaatgttctattttatacaaaattataattaaatactaaattaattatctaaatgatttaagaagctattttcttagcagatggttcatccgttatatttgaagtttcagttttagtttcagtttctaattttctcttcttgtcatttaataatttttgttgttcctttgtttgttcaacaactttatccaatgcttccttcattacatcttttccatttataccatcaactttcctgaaaaatggttgtaatctccagtatggaacttcacgatatttaccaccccatggttgtaattcgcctattttaattgtatctaattcatcaatattttcctttttgaaaatttcttcaacaatttcttccatcataattataactttttcaatttcttcaaatgatgaatttttatttaattttgcaatttcacttctaacatttgtatgatatggtaagaatgttttcaaacttttgaacatatgagttttcatacatctcttagattctgtacctttacatgatttaacaacttcaaaatattctctcatgaatttatcaactcttgggaaaagtttgtctttatcatcagttttagtccaaaatacacctggattacttaaatttgcttctgcgctcataactgaatcacaaccaatttctttaatacatctatcaatatcatcaggatataaaatatttaccatttgatatgaaaactgtaccttcaggtaaattttctcttaaatatttaattaaattccaatttgctaaaccagtaaattgacctttcatttctcttgttctaccatgaactgttagaaattttgcacctgcctttaaacataattttgcatactctaaagattttgaccaatcatcataaactctaattttagctgtaacaggtaatgtatcctttaattcgactgctaatttattaattaatttataaactaaatcccattcttccattaaaaatgatccataatgacctttctttgcaataccttgaggacaaccaaaattaatatcaactgcatcacatttaccaacaacatatttggcagcctctaataaaatatctggatcatttgcacaaaattggattattaatggtctatcaatttctggattaccatccatttcacataaaaattgatccctaaattttttatcttgactaaataatcttgaatgtaacattggtgaataacataattcagctccatatcttcttgacattattctccatccaagttcggatccatcaaccattggtgcaacaattttagttggtttacccaatttattaaataattcacgacctgatttaatagattcttcaatatctatagtatcatttataaatgaatctgtttcaacttttgtcataatatttttacttattggtattgatgatggtttaaatagtatttctgaagtatttaacagcagaacttaataatttcatatgcttacaaaaaacaaatacattaaccttacactctttactgtaaactttgaaaaaaaaaatatttcatggagaagtccgactccaatagaaaaaaagaaaaggaatagaaaattacgtaatcgtcaacggtttatcttaatgtaggacatagtgggggtatcttggaaggtttactgtttagaacattcctttttatcggtttaagacagggtacagccactatgtgatgttgttttaatggtgttatgtgtagcttatgtagaaacttaatcaaaacatagtaaaactgttttgtagaaatttgtaaaaattaacaactttaaataattttagtttacaaaaagtatcttcaactaaataacaaatggttatgaaacttaatttgaaataaccttctttttacatttaaacaacagtagcatacaaaatagcatccatataatcaattacaatattattatacagtgaaatcacttatctaactaacaataaattaacttattaaccaatcacaacatatttttctgtcatggcagttgagccaccttaagattatgaaaaaaaaaatgtttcgaagtaatacatagaatacattaaattatacaacgaaattacaaaaatttattttgataaattattctcaggactccaaagagaggtattttgatgaatattaattgctcttgcctttaaagcttctgcaaataataatgcaactggccaaactggtgcatcagctaaaattctaacacctaaagataaacatctttgacttaatttaccacttacaataatttgtgcaattggttttaaatctccaggttctaatgctaatcttgcaatttcatcatctaaaatatcaacatccagagcaccatttgcttgcattcttaaaaattctgaatatgattgattatttgaacctaaaggtaataaattttgttcaatttttttaaaaattttttcagctcttaaccataaaactctatcacttgttgttaaattattattattattatttgaatttaaatatttatgagcccacgcttcagttgtatataaatattcagaaattaataatgttgaagtaaataaacatgtaaggaaaaaaattggtgttctaattgaagttttctctgcatcattattaattagaaataatttcaatccataaattaattatatctaatgaataattaattgaatctcttaaagcttcaatatcacgatttaaattttgaatttcataattcattaattcccaatctttattccaaacatgatttaaaatacctgaaatataaacacatttattaattttagcaaatgaaagtaatggtaaaattaattttaatattgaactattattaattatatgaatattttgacctcttggaactaataaaccaccatttttaatataattactttcccaaatttttattaatgattcaatatatggtctttgttccattctccattgagctaattttgcaccatatgatttattattttccttttgatttttctcagattcactatgaataaattcatttaatgttaataataatgataacatacctcttaaaccaatttctttatctaatgataaattttgtaaatttctaaataattctttatatggtaatccattacttaacataattaaagaaaatttagaatttagaattaaattcttttcttttaaaattagaatccattcattaaaatttttacaattccataattcatcaaattgacaaggtgaaccacattccatattttcaaatgataattgaatatttgaattatttaaaataccaaataaaactgttatataatgtaatacatgaattgttctaattcttgattgtgataaaataaaatatttaaaacatgaatcaactaattcaaaattatttgaaaatgttaaatctgaattaatatttggtggtaataataaactttctaatggcatatctaatttagttgttttaattaatgaaactaatgaatttaattgtcttgaaattaatttagtaatttcttgatcattatgaaacatacctaaaaacatatgtaaaactaatgattgagttatatgtaatggtatatcagtaaatttatgtaattttaattgaacttccataaaattatgaattaaaaatcttgaaaaattaaataatgttgaagaatttctagcatgaaatgaatataatgcaccaactgctgccattgataaaagtaatggaatttgatctaaattttcatcaattttaaatgatggtatatgaataaatggaaaatatttattaaattcaatttcataaagtgctaaataatgattaagatcatctaattgaggaaattgttgttctgataaattatatttttccattatatgatttctaattgattctgaacatctaccaggaattgttggattttgataagtatgtggtatatgttttgataaatcaatttgtcttgatctaaataatttttttaaatcatttgtacttgaaggagaataactatttaaattttctgataataaattttgattatttaataaattatttgatgtattaattgataatgaaggtgaatcaacaactttgactattattaatattattaatattattattaatattatttgtatgtggactatcagtaaaaccaatatgatcagaaacattcgggaaattagtttcaattggagcatttataaattcattaaaccattcagtatcagatggatgagttaaaactttttctaaaattgtactaggttcaggatgtgataaaactttttgtaatgcataatctgagtttggatgtgataaaactttttgtaatgcttcacctgaacgtggatgtgataaaactttttgtaatgcaacaccattttgaggatttgataaaactttttgtaaattaatatctcttggactcataccattattactttgattactttcacttcttgtttcatccttaatatctttatcattattagaagtttcatcaatagagttattattatgattattactattgtaagttgaattagttaaatcagatgtaaaattaaatgttgagaaatccagtcctaaatcatttaaatttaaattatctaataaatcaagatcaacataacctaattcaaaatttggtctatattttaattgaggtgaagagaatgaaacttgttgaggtgcttctttctctaattcttcaatatttttagcatgaggagttttagtatcaggaaatccagtatatgaagaggaagcagcagctgagaatgatgcatgtctttgttttctataatttgaagattttgaatcattaagtgtattagttgtaatattattattattattattaatattattattataatcgaattcatttgaatacattgcttgaggattatcaaaatcattattttcactatctaaatcagaatccagttcatcggaattaagattatcatcatttaatgaataaggatttgaatcaggatttgcgttacttttattttgactttctggtgttatatttgaattagtaaagatattgttatttatgttattattattattattgttgttattcattgctgattgattatttaataaatctggagtgaatattaaaccattaattgaatttggtgaattatagatagcattattattacctaataaataagacatttgatcattttggaaattaattcccatatttaaattattaatattcatattcatattcatattcatattcataccataattcatttcattactattcattaaattttgaaatgatttatcattaattgttgtatcattgttattagagttattttctttaatatttttaggaatttttgaattattatcagaattaggtgaaattgaagaatgattatcagttgtattacttataattgagaattgactttcatttttttcattatccattaatgattttggattattaataactggtaatttagcacttgtattatttcgtactatattaatattatcatttaaatgatctctaataatttcaccatcttgactatcatatttttgtaatttaccctttctttgaatatttgaacgattattagttggtaatgaagcatgtaatttttgttgatgtcttaaaactaaatctctacgagcaaagcaacgaccacaagctgcacattggaaaggtttttcatttgtatgagatctttcatgtcttttcaaatgttctaaccttgcaaaagctcttgtacaaattgaacaaacatgaggtcttggtttatttgaagataatttattagttgatttagttgatttagttgatgcaacttttttcaaaggtacaccaaattcattattatttaaagaattaacatcaaatattatttcaccagataatttattattatcatcatcagttgggaaaactctttttgaatttggttcatttttaattaaaggtgattgtattggattcttttcagtcattttttaaagttatgcgtgtgtgtgtgtgtgtgtgtgtgtatataaaacaggggggtataagtatatttaagtgtgaactacacgtgtattgtatgtaccagcactaatataagataggaatataagataggaatataagataggaatatagtattaatataaaattcaagagaatagtagagatgagccaaatgaatttaaatgaatgagcctataaggattaaaggatgaagtttaaactaaaaagtaaaaaataaaaagtaaaaagtgaaaagttaaaaattaagattcagaatagattagattaataatattataataataataatgaaacagcttaaaaaaagaaaaaaaactggaaaaatgcttgagtattgagtattaatgaggaaaacgatgatggtttttttttaataatgtgggaaaagcggaaatagctgttgtttaattggctttgtttcttattagttgttgttagttattgtgcttgtattataaatgtaatataatataatatagttgattgtaactctagtaaaacgcagtgatacattaatattaataatgatattaattaatattaaaacagaataaattaatgagccttaatactaatactaatatatactaatactaatactaatactaatactaatactaaattattaattattattacttacacggctgtttaatcttaattttaatttttaatttttatcggactcctataaattataattttggtattattttaatgttattacgtaataataagacatacagacgacgcaccgacgcaaagtcacgtgcaccggatataaaattaaatttaaattttcaatttttatttttcaatttacggagataatcttttaaacgaaattccgcgtaaatattaatattagcatttaaaacttaaattaatataacacgtaatttgctattaatattacttagtaagcctatttattgatatcacagaacttattctatattaattattctaatcttatcaatcatttttatttcatttatttgttatctatttcttatctattatttaatccaatcatcaataatgttaagagctttaggattctcatctcaatctctttcacaagatgaaattaatgaaaaaatatcaattcaagctttacaattagagaaagctttaaaggcaatggattatgttcttgatgatagatcaaatgaagcttttaaattattaattgatcatgaaaacattgctatctctcaattagcttatggtgtggttcaattcttagaagcaactttaggttttgaacctgaaacaatgaaaaaagcttcagaaactttatcaaaggctgaatcaatgtcttggaaggagaaaacttttgctgaaaataacaaaattaaaacttctaaaatttatcctcctggaactgaatttgctgttgcctatgctgaatcaaatttacttaatgctttattaatgttattaagtgaaaattttattgaaggtgcaaaagctttattaaaattaagaagagcttatcaaactttagattcaattagtaaaaattttaaaaataatactgatattccatcaattgtatctcaaacaccaccacaaacttcatcttcttcatcttctttatcctctttaacatctgctgatttaattaatttgaaaagttatcaagattgtattaaaaataaagttaaattcccagatttaccattacctcaatcaaatcaagaaatgaaagatcaatcaattattgataatttagagaaaacttatcatatgcgtttaggagagaattaatggttctcatattggtaatccaccagtttcaaattctcttagatctaaattaggttttgaaaataatgaacaagatgataaagatacagtatcttcaaataatataccaaaatatggtaatccacaaatctcatcagttgatgaatatattcattcaggtgttaatttatgttttggtattttacaagtagttttatctcttatacctcctggaattggtaaagttttatcagttgttggttttaaaggttcaagagaggcaggtttacaaatggtttggaatgcagctgaggaacgtaatattcatggtggtattggtttattagctttattagttttctatgatggtccatttcaatttactgatgttgattttgatataccttcatcattagaattaagtaaaaataattcaaaggctgatttatcaagtgaaattgaaaaaattaaaactaataattcaaataaagaaataattgaagaaaaattaaaacttgaaaaaatggcaactttaggtcaaactgaaactttacttcatcctggtgaaaaattagttaaagttttattacattcaagagctttattccctcatagcaatctatggttattacaagaatcaagaatgttagcttcaagaggtaaattattagaagctgttaaattaatggattctgctaaaccttcacaaatgaaacaagttgatgcattattaggttttgataaatcaatgattttaatttttttacaacaatttgatagagcaggtgaagaatttttaaaattaattaaaattaattcatattctcatgctttatatacttggttttcaggtgcttgttatttagaagcttatagaatgtgtaaatcaaatattaaaacttcaaatagtgatgtggattttaataaaattaatgaatatagtgaaaaggctgataaatatttaaatatggcacctgatttaattggtaaaaagaaatttttatctaaaataccaccatttgaaaaatttattgctagaaaatataaagaattaaaggaaactcatttaaagaatccaaatttaaaatttattgattgtgttcaaacttcacttgtttatgaattagcttatttttggaatggttataatagaatgtcaactgaagtacttacttcaactatttcattattaggttattcagcaactgattcatctaatatatcaaattctttatcatcattatcaattcattctaaatcttctacaatttcatcattatcatcttcattaccatcaccaatttctttatcacttgttaataatgataatttatcatatgctaaaatacctgaaaataatgaacaaaaaatgattagaattacattacaatcaattgcattaagaagattaggttatattaaggaaggtttaaaaattttcgataaatttgtcattagtcaaataattttaaaagatggtaaaattagtaaacttaatgcaaatccttatttatacccaactgcattatatgaacgtgcattatttacttggaaattaaatggtattgatggtttaaaagattgtatgaaatggttaaaattaagccaatcttatggtggtgatgattatgaattaagtacaagagttacaatgaaaacaaaggcagctgttgatagattagaagatttaaattactaatctgattaatctttctactttttttaatgacaattcttttaacgatacatttttttttacctatatttacttttaaatttatacatttttaacattttactattattcccctcttatttttttttcaaaacaagtaaaataaaataccttcaactaagaagaaaagatacattgctaaattagttgattgaagtttaaatccacttgaaacaaattcattatcatcttctgaaaggaaaatattaccatcacgatatttaattatatcattctttaaaattcttgaatctaattcaccatttaataatgattgtaacattctagcccttcttaatgcattggattttaaccattccttttgttccctagttttagcatattttgtaggatccatattttcaaataaatctttacccatatcatcatatgaacttaataattcttgaatttcttcattttcttcatcattatcattctcttcatcttcagttttataattttcaaaatcatcaaagttactaccaaatgctgtgactttcttattataatcatttctatttttggtaacaacttcatcatctctatcaagatcaaaatctttatatgttaatccattagatctttgtaaaatatttgatgcatcttccttttcccaatatgtaataacatcacttaacagattttggaaactttccaattcctcatctggtatattggcaaaatttggttgtgatatatcaccttttgtattagtattagtatttgaatttgtactttgttttttattacccgttaggttttgaattaaaattaccatattgtttatcattatcagatttttcattatcatcacaatcatcttcaacaataggctttttgggagtttcacaatcatcatcattacctttcattttcttaatttttttcaatagtttttgaaatttattacaatcagaggttgctaaaaatccctgcccatttttctttacccatttcaagataatgatccattatatcctttaattcttcagtatcaacttgataaactattggtctaccatcattttcataaaattgatcatcataatcaggtacaggtccagtaacaggtatatcaatttttttatccttcaaacctaattttttctgtaatcttttaaatgcataactattaacagctaaagattctgtatcgtcattattgtcatcattagaaatgttatcattaccatcaattatttcatcagtctcaccattattattgttactaatattatcatcaaaagaatcatcatttttaacatttttattatttttcttattatttttaatatttgtgactgtcttagattttgcccttgaataagaaacaggacttcttttttcaatatttaatgaattaaatgcataattatttatgatatctttattttctttacttaaaataatttgtggattatgttgttttgcatattctgtactcattgcatttattgttgatgtactaaataacatcattggtaatacatagcaaagtttaaccatctttgattatctacaaaggattgtttgataaaaagagatcatataggggtacatgttccaaaactgaaaataaaaaaattaccccatattaataaattgccctgtactaagaaaaaaggtgtttttttttcattgaaataaactatcaatatcaatacccattggatccattgatttgaagaagttttccatattaaaattattcaatgcatcaccaaacaattcatcattatcaagtgttggattatttactaaaatatcataatctggaatattattattgttattattaatattattattgaagtcataattattattattttcattgttattatcaattctaataaatgaacctcttctaggtgacaaattattttgtgaataatcattattattttgttctgcatattttgcaaataatcttgcaaaccattttctatcatcctcagaaatcaatgtgttggtattgttattaatactattattgttattaaaaccgttatttgaatccaaattagtattattagtactaccattactttcatcatttgtagtattaacactactaacagataaatcatcatctaaattaatcaattgatcattttcattagtaggtttaaaatgtttgatttcttcaatccattcatcaaaccaaggttgattagttgcattaatttcataatttttccaatttgtaatttgaattaatttccaaactttttcaacatctaaaaattcaaaataattgaataaatttttatatcttgaatagtcatgtaattcattttttaaagttttaacaagaaatgtattaacttttaacattctccatgcataaaaatattttttcgataatatttttagtgatggtatataaactttttgaattatacctaaaattatactatttttgtaatattgtaaaagttgaatcattttattattatattcattatctttattatttcatttcattttcattttcattttcattttcattttcattctcattctcaattttattattattttcttccttatatttgatttcaagtacatttgctttaataaatgatgaaataaagaaacctaaatttttatgcataaaagtttcaattacagtcaccagaaatatatcaaatccagaactgaaaaatttctcacttgatttaactaatgacaatatattaccaaaaacgtacatagtttcacttaaaattttttgatgaatataatgacatatatctatttttgatttaatttgatattcacttaaaacatgcattaaaattgattgtaaaagtgttaaaacattaatataaatgattaaatttgaaatttttctaatattatcataatgattaaaacattttcttgataaaatattattaaatgaaccaaatctagtataaagttcagttagtaaatcacaaattttagagaaaattacttcaattttgggattttctttcatatctaaaataattttagttaatgacatcattttttgttcaattaaaaattttgtttcaatcatttcaattgtaattttttcgatatctaaatttaaattatttgaaattgatacattaaattttggtaattttgtatcaaaaaatttattatcaatttgtggtatataacttgctagagttgtttgatgattatcagctgctactaaaccataccaaatttttcttttcaattgtgataatctatcatcagtttcaatatctttattattaatattattactattagttattggatctctatttaatcccatcattgttgccatttgaattaataaacttgtataagtttgagaatcaccatcagcaaaagcatcacaaccattccttttttgatattctcttaataaaattgcacattgtaaaacaggtaatgaacatcttttgaaaagacaaaattcatcaagacataattgtgcataatcaataattttatctgataaagtaatattaattaatgaacattcatcatttgatggatttagaattggtgcaccattatttgaatataacgttaatgaagataatttaataacagttaaaagagaaccaattatggctaagtcatttttatcagtaattttaaaatcatttatatttacattttcatttgataatctatctttttgataatttatatttaaaattctttcaatatcattaataaacatttgattatcaagatatggagcaaatggataaatataattgaaaaatctttcaatagataaacaaattaccatctttgaaggtaaaatttgataaattgattttaataaagaatctttagatactaaaattgaattaactgaacgagttgaaattggtctttgaattgaaaaagttttaggtattttagtatattgaaatagggggaaattatttttattattttcaacaacccatttacacattaatgaaacaaaaggatcttttaaaacagcagtcattggaactaatggaccataattattaatattttgattaataaaaggtatatttaatataccatcataaatatgaatttcatctgaggggtcaacattaagtttatttaataagtttaagatgacatatgaggttttatttgaagatgtatttaaactgttagtatcattattagtaatattattattattattattataattattcaatgaagaaatttgagattccaaatatttaattttatcatttaaacgttgtatctcggtggtattaatttcaatagaatcaacatctgaaccattttccaccttacttggaatatcaatatcaatatcaatatcagtatcactattgctattaccatttgtcgtaatatcattaattttaaagaaagtacaatttttcaaaccatgagcttgacaaattttacaaattggctttgaacgatcacatttaatttttttccttctacaatttgagcaagaaagaggtattctatttctcttttgatgatttttatttatacttgaaatagtcggcatgtaataggcatttatttgtattgatttctagaaaagaaagtaagaagtagtaaagtgaaaaataaattcggcttagtaaagcacagtgaaaaattgagttttcctcaccattaagaattatactatatagcttgtggagaaaggtcctttccttaataataagtaagtatagtataaagactatgagtgatggtgtagagaatagagacaataatggaagtgataacaaggtaagagatatcaaagtagtgtatgaatgtatcagacagatgttatcattggatacagatctagttatagaggaattagatatgatgaaagaggttaatgatgcaattataactagatatagagatttaaatagttatagtgaagaaatgtatcaatacagtaatgagtataatagtaataacctatcattagacactaatacattacaattaatagagaatagagttgataaattgttgttaacagtagaggaaatggaggaatggtctcatgaaatggaggtaaaatttaatagagtgagaaattgataatttgataaattttggctttttttcacatgtcttttattatcttttaattacttcttcttctttattttctttcttttcttttcttttgggcaaacaaatgactagtcgacgattaccactaaagatagatgatctattagacaatactatgaaagagggaatgtacaaataacaaagttaatgatgatgatataatattagcagttaatgcattagaaaaattaaaacaagataattctaataattataatcataatcataatcataatcataatcataatcatactccttcaagatcaccttctcccgttataacacttaaacctacaactatatttgataaagttatatctcatccacttatatcgaattcctattaattatgttttggagaaaactattcaatacttcatctaataatattattatcaatactagtagtgaaaataatgataataataataataatatcgatagtgctaatacaccatgtgaaaaaaatttagttgataaaaaaatttctttacctccattaaattcaataactaataaacttcaatcactaaagagatcaagagatgatgatgatgatggtagtgatgttgatgttcatgttgatgatgataatactaataaacctgttgatccccttacctgttaaaagaataaaaaccgccaataatactactaataataataccctgagaaaaaaagtttcaattaattctgcattatcagctcaaaaatcattagatgatcttaaacaattatcaacacttaatttaaatattgaaagtaggaaaaaattaacaatgttaatacaatttcttaaattaggtaatactcaattaagtgaaagaattgataaattaattgaaaatgttgataataaacgtaataaaattatgtcaaataatattactaatactactacttcatctgatataaatattcaacaaattaagaatgaaattatcacaactgttaaaaaaattgttaatgttgtttcaacagtttcagctcaatcactaactgaacctgcaagatcaaatgtacgtgatgcaattttaaaattacctacaaattgggctaaaatgttaaataatgagattaatgaaggtaatgatagtgatagtgatagtaatgatgataactactgatgataatactgacgatactgatgatgatgatgatgaagaatatgaagattctaatgaaaatatagtgaatgagaacgatgatttggaagatgaaaaaattgaaaaattgagaaaattgttgttaataatagtacaatatttaaaagaaataggaaaccatcaattagtaaaagaataatggatagtttaattaaatatcgtcaaagacaaggaatttcaattgataggaataaaattttagttaaacaatggtttagaaaaaattttaaaaatcaaattatgaatgattcaagtggtaaagttttaattttagctcaagaatcattagatatgattaataaaattattaaattttgtaatgaaaatttagataaggcagataattggaattcaaatagacaatatcaacatcaaattgaacttttacataaattacaaaatattgataaagttaaggatattaaggaagataaatagtatatatttcatatttatatctcatatttatataatttaatcaagtgcttttaaaacaccttcaataccagatttttcaacaacacctttttgtgtatcaatacctaaataatcaattttaccctctttattaacaattatagcacttcttaaaccacgtaaaccattctttgcgaaaacatcatttggttcaccaactaaacctaaacttgataaccattcagcacctgcatcactaataaatttaatataaccattacttaattcatctttaatttctttcttatcactaactaatgaatcaccccaagctcttgtaatgaaaggactatcaactgataaaattaaaacttgtttaatacctttttcctttaataaattaattgaacttgttgtaagaaatgcaggtatatgtctttctgaacaagttggagtgaaagcacctggtacaaccacaattaaataaggtttttcaattttatttaaatagattttttcaggtgcaaatgagcaagcaccttcaattgcaggtggtaaatgaaataatgggatttctgatggaatagttgaaccaatttcaatagtcattgtaatgtatttgttttatttgtctaataaaagaagtgtgagtgttaaagttctaaccattaagaagatatcggagtgtatttatacgaaaattattcagggcctggtactgtggcttttattagataattaggtaatcctcggctaggttaccgcttttgggaaggactggttagtaatagccaggggaggctcagtttgatttctatttgtaatacttgttcttctttctggaattaccatcatagagtgtaatgaatatatggtataacgatgatatcatatgtactgtagtacttatctcccttgatgattgatagtatgaagttaagataataatttaagttattgaatggatattagattatgatttattacaattacattaccagacactaatataatttcgataatatcaacatcaacatcaacatcaacataatttattataattacacaataacacatcttaattgagatcagccaccgtagtgttaatcagtagcccctatattgaagtgaaccctctcaacgataccagaaaccgaattaattatgtcaaaagaagtatctagcccattatcggctgttaaagccaaatcaccagaaaagaaaggatcagattatctcaacacgagtaagaataaaaacaattccaatgatttatcagaaatgttagcactgaaactgaaaacttagcattttatgaactattgaaaatgatgattagagcattaagagagatattgttaatttaaataattgttttggcaatttttcaacaaaagtgggtcaagataagattgcaaataatgaatcattattgtctacgaacaaagattactagctttcggccggtgtctatcttaaatgctcttacatgaacaattcagaaataagaaaatatagagggaaatcattcaattttatactcactggcgagaaatttaccaagggaaattgaaaatttgaaaaatttaatacacgtgccctgtataaacgactttactatggcgtattatcattataatattaagatattgccctataataactgataagatataataataataataatgataatgatagagggaaatgatactcttgatggtatccttattccttggaatatctatctttcatcatctgataatcaatctaccttgcataatattacttcaaatatgtcttcaataatatatcaaccactgtcacataacttatgtccaacacctatattttcaaatcctttaatatcaccaaattctaatgctttatctccttgttttgtatctttattatttggtgttctgtcattatcaactggtttaactggattatttcaattaattaaatatctaaaatttacttcaacttcaggtcctttggtatcagaatctttccatcaatatttgaaaatttcacttgttttattaaatgctttattgtttagaataatatttatttcaaatgctttcaattcaaataataacttccaattattaatgtatatttttacaatagctcatttgactttaataattttaccattacatttaattgaaatgtcaaaatcaattgttccatctggttctttattattttattggcctttacaatcaggtttattattagctgttattattcaacaaattcttgcatctgaaaattataaaattattcaaaatcaatcttcattcggattctttctcctaatattattattattaacaaattttacaattttctcattagaatattattattataaaccaaataaagaattatatctagataatgaagacaatattgcttatttatcagaacctgatattatttcaaaattaactttttcttggatgaataaacttttacaattagcttatcaaaatggtggtttagaacaatctgatttacctctacctccaaaaattgttacaacccaatattgtgctcccatcctagagaagaattggaatttagaatataagcaaaatcctcaatccccatcactattaatacctttaactaaaacttttggtttaggtgttttatctgctttaacatttgatatgttagaatcaattgtatcatttattcaacctcaattattaagaaaattaattcaattttttaatattaaagatgattcaaatcctttaattattaaaggtttaacaatctcatttttaatgtttttatcaaatttattaagtacagctttttacaatcaatatacaattttaacagttcaagttggtcaaggttgtaaatctgctctaatgtcaataattttcaataaagcaatgagattatctccagaggaaagaaacaatagatcaactggtgatataattaatcatatgtctgttgatatttccagaattcaatcattaacttcttatgttcaaacaatggtaagtgctccaaccagattaatcctttgtctatggtctctctattggttattaggtaaatcaacttttgttggtataatcacaatggctataatgattccttcaaataccatattagttaaatctttgaaaagttatcataaacaacaaatgaaattaaaagataaaagaacaagttttgtaactgaaattttacaaaatatcaaatcaatcaaattatatgcttgggaagatccattgttaaaaaaattaaaagttttaagagatgataatgaattaaaaaatttaaataaaattggtattttatctgctggtattaattttgcttggacttgtgtcccattctttgtttcttgttcaacttttgcaacttttgcaattatttcagatataccattatctcctgaaattgttttccctgcactttcattgtttgatttattatctgatccaatttttgcaattccttcattgataactgctttaattgaatgtaatgtctcattaaatagaattctatcatttttaacagcaaatgaaattgattcaaaagttataactaaattacctcctgtttctaaaattggtgatatatcagctgaaattcaaaattccactttcctttggtcaaatcctattgaatctaccaatctttcatcacttgaagaacaaattgaaggtaatttatcacctgctttaaaggatataaattttactgctaaaaagggtgaattaacatgcattttgggtaaagttggttcaggtaaatcaactttattgaaatgtttattaggtgaattaccgacaataccatcatcaaataatttaaaaaattcaattaaattacacggttcaattgcttattgttcacaaattccttggattattaatgcaacttttaaagataatattttatttggttataaatatgatgaagatttttatcaaaagacaattaaagtttgtcaattattaccagatttagaaattttaccagatggcgatgaaaccttagttggtgaaaaaggtattagtttatcaggtggtcaaaaggcaagattatcattagctagatcaatttattcaagatgtgatgtttatttatttgatgatattttaagtgctgttgatgctcatgttggacaaaaaattatcaatgaagttttaggtaagaatggtattttaaaatcgaaaacaagaattttatcaactaattcaataaaagttttaaatcaatcatcaaaagtttatcttttggaaaataatacaatttccgaatctggtacattagatgatattaataataatattaattccaatttatttaaattaattagtgaatatggtattaaaaatgatgaaaatgatgaaaatgaaattgaaagtgatcaaccaattattattgattcaaataaagaagattttacccaagtaaatgatcaaaataatgataatttaattgaaggagaatatgaaagtgttggtgcattaggtgttaatcttgatgaaacaaccggtgaggaattaataagatttgctaataagaatactgaagaaagtaacagtagtgatgaatatacattgaaagctgcaagtattgcatcattcaaacaattaaattataataatgatattgatagaaagatgaatcaaactaaggaaaagaaagaaaagggtaaagttaaatggtcaacatttaaaaattatgctaaagcatgtacatattcaggtatttttattacactatccttagttgcaattactgttggtatgtcaatcggaagtaattattggttaatgcattggtcagaacataatattaaggaaggttcaaatactgaaatttttaaatatgttggaatttatgcattattaggtattgggtcaggatttttaacattaattagagcaatgtgtatgtggacattatgctcaattcgtgcatcaaagaagattcattatgatatggcaaaggcagttattaaatcaccaattatgttttttgagacaacaccattaggtcgtataattaatagatttagtcaagatatgagtaaaattgatagtgcattaccaagagttttctctgcattatttggatcatgtattaaaacattattgacaatgattataattggatataatatgccaattttcattataattataattgggttattcttcatttataattattatcaacaatattatattacaacaattagagatttaaagagaattatgagtattagtaaaagtccaatatttgcactaattcaagaatcaattaatggtagtgaaacaattagagcatatggacaaagtaaaagattttcatttttaaattctgcaaatattgataataatttaatttcatcatattgttataaatcaacaaatagatggttatcaactagattacaatttattggatcaattattacattatcaacatcattattagcattaatatcattaaattcaattgataatagaatgagtgcaggattgattggtttaattatgagttatgcaatgagagttacatcaagtttaagttttattgttagaaaatcagttgaaattgagagtgatgttatttgttgtgaacgtatatttgaatattgtaatttagagcctgaaattaatgaatcattaattgaagataaattaattaaacctgaatttaattggccaaataatggagaaattaattttaataattattcaactaaatatagagaaaatcttgaaccagttttgaaaaatttaacattttcaattaattcaagggaaaaaattgggattgttgggaggacaggagcaggtaaatcatcattagttttatcaatttttagattattagaaccaattgaaggatttattgaaattgatggaattaatacaaataatttaagattatttgatttaagaagtaatttatcaattataccacaagatgcacaatgtattgaaggtacaattagatataatttagatccattaaatgaatatagtgatgaagaaatttgggaatcattgagaatgtcaaaattagataaacatattgaaaatatgtcaattgaacaaaatttacaaaatgaaccattaaattgtttaattagtgaaagtggtagtaatttatcagttggacaaagacaattaatttgtcttgcaagagttttacttaagacacaacaaaagagtaagattcttattcttgatgaggcaacatcaagtattgattctgagacagatagtgttattcaaagaaccattagagaaaaatgtaatcatttaacaattattacaattgcacatagattaaatacaatattagataatgatcgtatattagttcttgataggggagaaattgcggaatttgatagtcctgcaaaacttttatcaaatgaagagtcaatgttttacaaaatgtgtgttgatggtggttatattccaaaatagatgcctttccccggaataacataacattatcccacattacgtaacagttgttccgtctttattaataataatgacataatctccccacaaaagaaaacaatagattatcatgagattttcccagtttttccagtttctccagtttctccattttttttcagtttctggttggttgctataaaaggaacactgtttgccgtatgtttgctgatgatggtggggtttttagttaatgtatttaattcctctttcttttcttttttctctttctcttaatcttgtatattatatttatattaatattagataacaaagatataaattatataaattatatattagacattagacatgacagtaagtaacgaaataacaaattcattaaaggaattagagaatgaatttagtgttccaaaggaaacacttttaaaaattattgattattttgttgaagaattaaatcgtggtttagttgatggttcagatccattaggtattccaatgaatttacaatgggttatggaatatccaacaggtaatgaaactggtgattatttagcattagattttggtggtacaaatttaagagttgttatggttcatttattaggtaatggtaaattagagacagatcaaggattttataaattaccatcaaatatgagaacaactaatgatagaaatgaattatttgacttttttgctgaatgtttagaaaaattcttaattgataaacatccaactggtatacctgaaaatcaagttttcccattaggttttacattttcttatcctgcaagtcaaaaacgtattgattcaggtgttttacaaagatggacaaaaggtttcgatattcctggtgttgaaggtgaagatgttgttccattattaatggaaaaaatcatcaaacgtaatttaccaattaaagttgttgcattaattaatgatacttgtggtgcattagttgcttcaagatatgttaatccgaaaactgaaatgggttgtatttttggtacaggtgttaatggttcatattatgaaattgttagtaatattacaaaatttaaaggcttaattccaaatgatataccagaaaattctttaatgttaattaattgtgaatatggttcatttgataatgcacataaagttataccacgtacaaaatatgatttaattattgatgaaacatccccaagacctggtcaacaaacttttgaaaaggcaactgcaggtttttatcttggtgatttattaagattagttttattagattattataagaaaggaattatttttcaaaatatttcaaatgaaactgttaaaattttagaaactgaacattgtattgatgcttcattcccatcatttttagaaagtgatgaatctgatgatttgaaaacttgtaaaaaattatttaatgatgttttcaaaattgaaaatgcatcgtttgaagattgttattttgcaagaaaagcatctgaattcattggtacaagagctgcaagattatcaacttgtggtatttcagctgctgcaaagaaaagaaattatgaaagttttgatgttgctgctgatggttcactgtatcttaaatatactaaatttgcagaaagagcagctgatgcacttgctgaaactttcggttggccagctgatatgccatatgaggaacatccaattaaaatcgttaaatctttagatggttcaggtgttggtgcagcagttattgcagctcttgctcataatagacaatcaaagggtctttctttaggtatggaatgatcaattacttttctatcattactttactttacttcacattattttactttactttacttcactttactttactttaccctcctctctttatgttttaaaccttagttaacgtgtatatccttttgataatgatatataattttatgaaatgacaaatttgatgaaatgaaaaattgaccactgataagcaacgaacttttctataatagacattccactttttcttttccatttccaaacaatgaacaaattacttgatggaataatacctgcaggtaacatattatcgatatcatctcatgttgttcatggtagtgttggtaatgatgcattacaattcccattaaatttacgaaattggaatattgattgcatctacacaaccaatttatcagctcatccaggacatggacaatttactggtgttaaagttgaaccaacattaattaaagatttaatatcaggattaagagatttaggattagataataattatcaagttataattattggttatattgcaagttcagataatttacaaactatttggaatgatgttttattaaataaaagtattgaaaattcatgtattataattgatccaattatgggtgataatggtaaaatttatgtttcaaatgaaattgttgaattatatattgaattattaactaaaaatgaagttataattgatttattaacaccaaatcaatttgaaatggaattattaagtggtattacaattaattcatggaaatcaatgttaaaagctttggatgtattttgttcaaaatatacaaaagttaaaaatgttgttataacatcagttattatagataatataatgtattgtgttggtgcaagtaagagtaaagtattttattataaagttgaacaagttgaagcaatattttcaggtagtggtgatttatttttaggtattttaacagatgaatttattaagactaataaaaatttacaaatttcattatgtaaaacaattaatacagttgcaaaagtattaaaattaagttataaaattatgaagaatgataaatttacaagtaaattaattaatggtaaaccgtatataccagatttaagattaattgaaagtaaaaattgtttattagaggattcagaagtttatgatccagtttatttaaaatagaataagtttatgttataagttctgtatcaatatcagataattcatcatcatcaatatgatgtttattattattattattatcttcattattaattaactgtttacttttctgcttttgcatattcatccttgctattttgattaaatcttcataatgatttttattttttttattccaagatttatgttcattttgatgtcttttaattgtttctttatcaaatgttataggtggtgaagaattagctgatgaattattactattggtatcactatgaatattattattgttttgagtgtgaatattattatttatcaaactttcccacttttttaatttagaaattaatgaaatatcacttacaggattaattgaatcaagatttgcattgtataaattaataaattctttcattctttgttccaattcatttcttttaccattaattggtaatttataataatttaatttttcctttaacttatttgttgaaattgatgtatctaaattgggtatcctttgttttttcttaatggaattaggttgtaattgtatattaatttgtctctttttagtgttcttaggggtagtactttcatcactactactgctgttttttgaaaaacgatcgtgaagttgttcttttagtatttctattggtacttccatttggatttttcaaacattgatcaatatgtttaccttgaatttcatcaggagtcataaagacaccacatattggacattcaacaagattatcctgaacctcttcttttctttcttaccttcattcccattcccattcccattcacatttccatttccatttaattcagaaataactgaaatatcagatgatgaatcattttgtgaatcatttactaaatcaattgataaatttttcaataaatcatttctattattattaaaccatttaacaatattatccaatataagtactttccttaaactactttcataagtttcttctgaacaaagtggacatttatttgaatttgaaattgtccttctaatacaaattgaacaaaatacatgtccacaatttgttaaaactggtgcatttaaaaaatctttacaaatttgacatcttaaaagtgaatctaaattactcaaacttggtaatttacaattatcccaatcacttggatcagatacttcattgatgttactattaaagttcattgatttaaaagaaaagagtatttattcattattattattaatatatttcaatactaaaaaatttcattacatgtttacgcgttactctttcattgggacttggtgatctttcatcaataaatctgctttgccttctggtaagatactcttagcccatggcggtattggagctgtaaatgaccaattattactaccatcatattcatccttatatgaataatgaaatgaaaataatctcatgtaattatcttcaacattaagttgattattataagttacatgggaacagtttgtacaaacactttccatttcccaattatcaactctttcatttaattgattctcatataattctcttaatcgttgaaattcttccctattaggtggtgaataaattggcattgataatattttatctttaccatataatggatcatttattattggataacctaaatttttcaaatgttgtctaatttgatgtttacgtccattttgaagaaaacatgagacaagtgaagtatttgaaactgaatcataatagacatttttgaatactgtctttgcattaaattgtttaccaacacctttattaaatggtttcgataaatcaatttcaattataggatttgtttcaattcgtatttgatcaccaaaattaccttcaactaatgcaaggtattgctttgttaatccattcctattttccactattttattaaattttgaacaagtttctgaatttttagctaatattaaaacacctgcagtatctttatcaagtctatgaattatccaaattttatccgtttgtaagtaatttttagtaatcatatattcaattgaattataattatatgccatacctgatggatgaattggtataccagcaggtttattaataactaataaattatcatcttcaaatattaaattttcattttcatttatcattaaggttaaatattggtacctttaattcatgaatacatgcaaaatttgcaattatatcattagttttgatcttagttgtcaatagagtagtacctttaatcttttgatgcttagagaaatctttaccttctatttttttgaaacgtttccttggacgataaatccataattcattgtttaatatttgatctttgaaaaaagttgcatttctaccaataaatatcttatttaaatattgtaatactgtaagttgttgtggaattcccttcaatgaaacattattatacattaatttcttatatggtgtaacatattgatatccatctttatattgataaattggtggtttcgactttggacttattctctcaacagtaattggaattttagaaactattgaagaaattgattcatttggtttagattctacatgtataattgtagttgttgaaatataccttacttacacatttgaacatttgctttttctatacgttaaatgattttcattaataaatttataaaaaagaattatactcttacttatatgctatatacatactaccataatttttcaagtgtaccaccactacctgtaccatttttattcttaaaatgtaataaagctgaaacaattttcattaattttgtatgatctaattcaacttctgcatcaaatgtaattttacctgtacctggttcaattctatttaatttttcattaataattggaattgtacctctaataattaatttataatcaacttctttaaggaaaattgaatcttgttcaggatcttcatcaatatcaccattaattctttcctttaatggttgaatatatttatttatatttgaaggtaattgaggtgaatcaattttacgataattaattaaaggttttaaccaatttttcctaaaatctaattcaataccttcaactgataatttattaaatttaattgaaatatcaaatttttcaaattctccgagattaacaggtaaaccaataaattctttaatttcatgattcatatttaatctacgtaataaaatatcttttgaagttgattttaataattcaatatcaatattttcgaaaccttttaattcatttaatggtataattgaattaattttaaaagggaaaaatacggttctattattaattgtttcataaataatataacctgaagtaaatattaaacaaggtaataaaacaattgcaattttcaaaaatggtatccaccatggttttttataagttattggtgttatgttatttgaattattgttattattattactactgtttttaattttttcaatttctgattgtgataattggttctgtaaaggtcttgaagaacggaatgaaggtggaatatttagacgatttttggtattagaggaaggaggtatttattttattattattattattattaatatattaatatttttattaaataaataaggtgaataagagaataatcttaattggttatatcgtaccaatctattagatgatttgagtaatgaaagcattgttatataaaggaattgatactgattaaatgtcagattttaagatcatcaattcatgtcagtaaatttattatcagcgagcgtctactttattattgaagatagtataggaaataggtctttattataagtaaggatattaataatgagtggtattagtagtaaaggtagtatattaacatgggatgatggaccagaagatgatgaagatagttggattgatgaagaatttgatgtttctgagatgattaatggaaataaggatgaaaagaaaaatgaggatgaaaagaaggatttagtaggaataataagaataagacagttgatttacgtaaaaagttagtaaagaaagtagttgataatggtatgaaggaaataccgagtaagccaaagttaatgagagataatgaaaagaaagagaataaaaagaaagatagtaaattaagttatgaagaacaattagcaaaagatatggctagattaatgccagttgcaggatggaaacctgaaattgagattgaaaataatgaggaagaatatgaagaaaggagggataatcattatactagtccaaagagagataacagaagaagggagtataatagtaataatgataggcatcaacattatagtaataataatagtaaccaccataataaaactactaataataagaaaactagtgaaattaagtcaatgtgggaaaatgcagaagaagaagaagaagaagaagaaggagaggaagagaaagaaagggaatataataataaacataatagagtagaggaaagtagagaatattaccgacaacagaaactaagagatagacttgaatgggatggtaaaggtaatgtaattaaacaagaagaaccaaaagaagaagatactcctaataatcctacaaaacattcacactttacctatgataacagtaaagaaagtaataatactaaaactaaaactaagaaagctactaaacttgattcaatatgggcttaatgattatgtaatatcattataaaatagacgcgactgtattacataataattattacataatacattacgtaatgtacattagtacaccatcttttactaccatactaatataatcttactaaaatttaattggttgagaaactctcactataataataataatagtggattgattttttttactttctcttaactaagttttcaattacataattatcatactgaacatgattttataatttatcttagtttatatcttatatcctatattttattattacattcaattaacaatcaagatggctaatcctcaaagaattattgaattacaaaaattttatcaaactacaactaaacctctttggagagctcatccaaatgctaatttagttttaattccttattttgctgctttcggtatctctttaggtgcttcactctatttcgctgttagagcaggttttggtattaaagctcaaaaatagattaattaattaattaactatacttatttaatcattcattcttatatatcattatcatactattattataaaacattaatttacttcttattaatatcaataccatcactattattatgaatgttgataattatttcgcgattttatcttgtcaaatttttgtaacccatcaatctatctatatacctttttttattattcaatggataattcaattaagaaaaaaagacgtcctcatacaagaacttcaaaagcttgtgatttatgtagacaacagaaaactcgttgtttaagaaataataatattaataataatgaaaatttaatttcttgtttacgttgtacttcattaaatttacattgttctctttcaaatgatattaatactaatattaatataaataattctctaaactcttcaaataatatcacaaatccattatatttaccctctatttataataattcaagaaatcattcattatcacattctccaatacctttaaaacattcagataattcaaatttaccacttttatcttatactcctccaatatcttcaattgatgtaactaaattagatataattaataataatgttaaatctattcttaatatactctcaaataataatattaatctaattaatcaaaattcacctcctttatcttcaaataataataatattcataataataataataataataataataataatattaataacataattcatcattcaaaacctttatctcataattcttcattaaattctttgaatccaattgatttattacctatttgtaatgatccagttaattttactaatttacccatacaaagttattcattatcaccaattaattatttaaattcaattaatgataattcatctaattccaatatctcacttacaattaccaatttcacttaaagcaacaattaaatccattacatttatttaaaccaaaatttgaagatataataaattctaatattttatcattaaatcaaacaattcatttaattaatattttccgtgatagatatggtcgttggctttcatttccttcacttaaatcaactaaaaatttaattaaaagattaaggaaaagatgtcctttattattaacaattagttgtttattaagtttaaaatatggtgatcctttattgaaaaataaagtttggtataaattattatcaattataaaaagagaaatttatttattaaattctttaaactcttatggtttagaggaattacaatctttaattattttaagtgcttattcaattattttaagtgattcatcaattaatgaaaataataaattaccaaatttgttattagatggttggaatttatcaggtattggattaattatttttgaaaaaattaattcaattggatttttagatcaaatgtatggtaaacaaattgaaaatttatggaaaattaataataattattcaaataatgataataatgataataatactaataataatactaataataatactataataccaaatgataataatacaacaaatagtatagataacaatgaattcgataatgatgattataataatgattacaataataacgacagtgatggcattgacgaagatgatgaagaggatgatgatgaatttaatttacttacattacatagaatttggaatactttagtgcttattcatttagcttattgtttattatatggtaaaaaatcatggatttcaattgaaaaattaaaaccaagggaagtttcagatatttcaagttcaacaaattttgattttagaataattgcagaaattcatatttatttaattgcatataaatatttattacttaatgataataattcaaataataatttaaattcatatagtgatacaattaaaagtattaaaatttggttagataaatggaattgtacatttggtcaaccatcaaatcaatttgttgaaattgattatcattttgttgaaattttaattaaattaaaacattcaaaaattgatttaaattcaatttgtaaaattattaaagataataattttaatattgaaattttaaataatttaaatttaaatgatttagataatttaaaaactcatagttcatcaataattaatttaattaatacaggttaatgatgattcatattttgcattcttgagtgatcaaattcatttaacagttttctttgcaactaatgtactaatatcttcattaacaattttaaattacttaagggaaaattatttaaatattaataattcaactacaaattcatcaaattttgataaatcagttttaaagaatttcattattgataaagaattactaaataaaattgaaaatttaattttcagatttaaaactgttgcaacaacaaagaatgatactttttacaaatattatagtatacttgaaagtaattataatattaatttaccaagtgtatagtaataataaataaactctatttacaattaataatattaaatcagactgacatgcaaatcgaatttagttttggcttatcatcacacaaagtgctccaaaactaggttaaagtatcatcacatttaatataatataataaactacaatgtattacattttaattccttttttcacctgaaaataaaaaaaacaaaatgcaactaaaataatagaggattacaattattattcgatgtttcagcagcacggctcgtcaaagccggtttatcatcaaaaatctctcttaacaaaagtgagattgcagttgaccgtcgtgattgtgcaaatcatcatataacgaataataataataaaaaaagaattagaatagaaaaaaaaaactcaaaagaaaaagaatcaccatcagactcgaaaaaacgtgtcttctttaaagaaatttcagacatatgcttgtctttttattttcaaattcatcatatgggaaaaatattaatagaaaaccattttgaattgtttgttggtaatataattttttaatgaataaaatgaataatttcacctgaaataattagtattttatctttagttgtatagtgtattgtaatatataatgtaataatattattttaattattctcatcagaaatgcatgaatggtataaaaaaaaggttatcagcattgtgcaacacatctgactcgtcatctaaagaaatcatcaattgagaataacaaacaataaaatagaaatagaaatagaaaaaattgtttctaaagaaagaaaataattgttattgataaattttataatcagttacgatgggtttctgaggcccatcattaaagcgttgtcactttcatgtactatcagtgcccagtgctataattcctcatgtaaaattatcaataatcagtaatataagaaaatggtaatcagaaccctttccaagaccttattccaaaaccattatatctatttccctctatagctctcttccccttaatccttctattgaaaaaataatgattattaactaagtgttcagtaagcagccaaaatttctcagcatttatataaatatatcagccggtaattccatttgtatattttgtttagtcatcatgcttagttaataatcaatatcatttataagtgaaaaaaaaacagaaaaagcaaaaaaaaatcaaagtaaaatgaaatgaaaaaatcaaacaactcttataagaatcaaacaagactcttcttgtataatcttaataagtcaataaaatatgtggaatttggataaaattttcagccaacattctaagatcatgggttaatcataaactctagtttgaatatttacggttgtgatcatcatctgtatccaaattaaacatacaaaaaagaagcccataataataaaacaatcacttcactcaacacactattactgaccaactggccaaccaacagtgtcttattctaacaaggacaaaccaaagaaaaaaaagctgagcctgtacctacgaaattggaaaaagtgggaaaacttctccttttataccacgaaaataaaaaattttcagcttgctcgccttttccactgtgagggaacttcaccactgaaaaaacagagggtttctcgatcaagtctataataacaactacacgttatatagagtatatataggttagaagattatacaaggagtaatgactggatctccatatacatgcactgaagtacccatcgaggggaaactgcacaacatgcagtgtgtttcattgccttccaatcttggtaaagctttaaaaggggctcgtttatcattggatgatatgttatccttaaaatctaataaatccattacaaagacatcatttgctaaattacatagattgaacatggttaatgatttagatataccaatattaagttttgaattatctggtgatgatagcaataacgataataataacattaattcatcaattttaactgtaaaaccaataaaatttaataatgctattaatgatgaattaatttcatattcttttaaattacctgcagattgtttacatgaatgtttcactattatggaattagatgaaaaaactatagttattgatttaatattacaattaggtattgttgtttcattaagattgaattattcaatttttgaaaatccaattgatttaaattatgagaatttctatgattggtgtactatttcaatgccatattcatttgatcaaagatcagttttatcaattttaactattgatgaatataaatcaatagtttcaactactgatggtggcttattattattatcaagattaaatgtttcttctccatttgatgttactccattcacttctgtttcatatttatccaatttgaaaagtaaatttttccgtacttcagaacaagttcaagaattaaaatttttaaatcagtcagttacagttgattcaatttttgatatgttaaaattatcaaatgatatattcgttactatttcattcgataaaaaattatccttttattcattatcatcatctcaaattattagacaatatgatcttaataattatatacctgatatattacatcattctgttttatcaccaacatcatgtaacggttacttaaaatatattgcaacttcaaactcaaataatttattatcattattattaaaattagatcaaacatatattttttcatttgatttatcaattactgaaagaaatgatattgaattagatttgttatcgaaaattactcacccttcccaaaatgaacaatggataccacttaattatgatgttacaacaaataataaatttactaaatatgctatctgttggagttattcaaatacttcatttataaaacaatgtattgttaaaaagatgacattaataataatgttcaatggtctgattgtattggtttagatgatgaacaaaagttaaatgctaaagaattgatggatttaataaatttcacagaaaatgatgatgaattgaattcaaaatcaattgaatttattatgagtgagtataataatgatatcttacaaatggctcttcagatatataatatcgaaatgaataatgatgttgatatcaatacacttgataatataatattaaagcttattacaaatcaatcagttacaaataatgggtttactttaagaaaaagttggttaaattttgttagtgtttgtcaagatattaaggaaaaattatattataaaacacagtcagttatatttgatagttcatcaaatcattcagatccatttttagtatgtattaaaggtggttcaagctattccataattagaaattctacatcatttgagatgttattatttaatagaaatggtaaatattcatcaataattgatttcccatatcaagatcaaattaatattgactcattaactaaacttgtcgatttatcattagattatttaacatcctttgaaggtgaactgatttataaaattaataattgtatgataaattcaagaaattcacatgataaattaatgaatgaaatttttgaaaaattcatatttaaaactacaaataatgcaaaagttacatatattttacaaactcttggtagtattgataatattggtgatgtacttaatttcttaacaatgttatttaatactgaatttgaggaatatactttgaataatagtagtgtcatgagtctattcagtgaaaaattaattgaaaaatcaattttattaaatgcaaaatctgctaaaattataattacaggtttattacttatattattaactgttgattataataaatcaattgaaaatatttttacaactaatttacaaaatttgaaaactattgatttgatcgaaaatatcaatttattagaaaatgaaaatttattaatgaaatttataaatctaaacaataatggaagagttttcattaaaaataatactattaatatgattattacagtattaaatgaacaattatcaaatgaaaaatttatttattttgtgatatctgaattaattaataagaaaaaatattcaactattgaaaaagattttttcgaatatttgccagatagtgaattttcaactgtattaagagggttagttactcttgatgatgatgagaataaaccggagaaagcaagagaaatgtttacacttgcagttgatgaaattacatcatataatacacataatggtatatttaataaatatttggaaattattttaaataaggaattaaaaatggaaattgaaactatatttgtaagttctaaaagtgcatattttatcaatttaagtcatttatttgagaaaagagataagcttgcagatgcattaaaattagctcttgaatcatctaaaaacattattaaggagaataaagttgatacagatttagaagaattaatttattataaaatatttaatttatcattacaattgaatgaatttgatattagttttcacagcaattaagcaaatgttacatcaagatagattgaatgcattacgttcatttatttataaacttttccaaatcaatagattaactgatattgttagattcaattatgcagaagattttgatacagtttatgaattaatttatgatcttggtgagaaaactatgcaatcaagaggtgatattaaaaatgcattaaaatattatcgtacatgttattcattatgtattaaagaaggtgatttccgtgcagctgttgaatcattatatcgtttcaatagtcaattgaaggctggtgaaagttcagagagagataagattttacgtaacaattatttgattatgttaaatattttaaagacaatggaagttgatgatcaatggattttacgtcataataatgatgaagactgttgtcatcacaggtaaggagctagaacatgaatatctcgatatgagaaagtagataattagacattagattattagatatattgtataactctcgtataactataataataataagtaataatttaaacgaataggagtaaagcgagatgtcattttgatggggtgacaagtgaaattttatatttttcatagtaaggactggtggtacttactccggctgatcttcaattactgtctgctgtttgtgttattagagtatagttggtgtgataataaatatatagatatatacaatggtattaccaaagaatgggaaagtggcaagttttgggtgcaggactttcaggtttatcatatgcacatttccttggtactcttagaccggatttaaatataaccatattagaaaagaataatcgtgttggtggatggattaatacgcagaaagcaacatctgcaacaattaataaacttaaattaaataatgaactgaatagaactttaagaatggagaaaggtccaagaactttacgtggagtttcaccgggtactttaattattactgatttactacaaagaatgggtaagttgaatgaattacgtggtgtacccattgcaagtgctggtaataagaaatatttacttggtaaggataaatatgctgaaagtagtaatagaataactgggaaattggttccagttccaggtggtggtaatggtactataattgatggattttcacaatcaatgaattttattgcaactgaacctggtatgcatattataaaggggataattagagatgttatgtttaaacaagatggtgaagatttaaataaaatgacagttgctagattctttgaaagacatttcggtaaagatatggcaaatgagagtataagtggattattgtatggtatatatgcagctgatataaatgatttaagtattaattgtgttttcccaacattagttgatattgaaaggaaatatggttcgattgttaaaggtatgattaaacgtgataacccagtagtagatattcatcccactgttagtaaatatttgaaattatttggtggtagtgaattagatatggaatcattatcaaaattattgaaaaaattcccaatgttagcatttcaaagtggattaagtggtgtaactgatgctttgagggataaattaccatctaatgtaaaaattcaaactagttgtcatattgatcaaataggttcagatggtgttattaatgttaaaggtaaagaaactattcaaatattgatcatattagaagtacaattccaacatcagaactttctaatatggtaaatgataaagttggtagtatattagcacaattctcatatactagtattacagttgctaatattcttatcaaaagggctaatattaaagaagctgttggatttggatttttaataccaaaggcatgtctatataaggaaacaccattaataggagttatatttgattctgatgttgaagaacatagtgttccattattccctaatggagaaatcccatcaattttaaatagtaagaataaaacagagccaacaaaggaagttattgatgaattatctaagaatatatcatcaagagagggtgaaggtataagtgaagaatgtacaaagatgacatttatgtttcaagttccacgtaatgggaaaccatccacccctgctgccattactagtgctattaaggatacactcaatggtatattaggtattgatatcgatatgtcagaggttgcaattgagtgtattacacatcaagatgcaattccattatacgatactgaatttcaagagagaagagaacaagtattaaaggaatcatccaatatttacggtgatcgtctctcactgggaggtacagcatttgcacccggtgttggtatcccagatgcagttatagggtcattagatgcagtatcagagattgtataaagaatttataaagaagtagctcttaatagaagtaaaagaccttaaccgatgtcgcataatgtgggactttcttaaccaaccgatttcctcttaaataagtattactaattcatcatctttttttgtaaatctggtgtaacttctttcttttcccatctttaacaatatttaatacctgagagatgcaatctattatcagaagaacactattgagtggccgtagggctatccatttatctacaacaactacaccatcagaaaatgctttaaaatttgtctctaatgacactaaatttcttccagagggtttaacacaagctattgatattgaatcattagctgaagcaaatgaaaaatcaccacttgcaacacaactatttaagattaatggggtacgatcggttatgattggatccgattttattactgttaataaagttgatgaaagtttatcaaataatccagaacttaactggaataatcttactccgaaaattaagaaatctattgaaacctttactaaacaaaaaaacccattcttcaataaagattttatggaacaacatcaacgagatttagatgctctggatgaaaatgatgatgatatagtctttgaaattaaagaacttattaatacaagaattagacctgcattacaagatgatggtggggatattcatttcagatcatttgatgaatcaactggtactgtctatataaaacttcgtggtgcatgtaaatcttgttcactaagtgaagatactttaaagggtggtattgaaggtatgttaaaacattacgttcctgaagttgaagctgttaaggcagttcttgatcctgaagaggaaattgcaatagcagaatttgaaaagtttgaaaagaaactgaaaggtgttgtataaatgattaatttactctattaattctatataattatttgtataagaatcatgacatttctaatgctgccttatctaatgatttggccattttaacatcaagttcactaatacctccaacatcatgcgttgttaattcaagttcctactatattgtaattgttaattatagtaggatgatgtcccatacgatgagctttcattgcaactctagttaagaatgcccaagatgtttcaaatgttttaaattgatatttacgtcgaatatgatccatttgaccatctctgataacacttttccattgtgggagtactttcaatgcgttctgaagttctgtactactcaatctaactaacttcgtcatttatattttcatccaataaataaagaaattgtgaataaacgattcaatctcatgatatatttatcatggctacatcagaaatcgctctacatcacaacttttatcaatcttgaccacatctttcatacttcagtcatttcaccaaaaatcatgtccagtgcaatatatattctggacagagacctcaatcttatagttcagagacaatacagacatgatcttgactctcttcacatacttaactgtttccgagccgcgtacaaagcttcatatccactaagacgaccagtgatatcgtatcagaacatccatttcgtttaccttttgaagaaggaaattatcttattaacaccaatcttcaatgatttagatatattcacacatatatcatttctagataaactttcagaattaattttaagttattttaaacattataaattattaaaatcctctgcagatgatataatagcagatcttgtacgtgacaactacgttttaatgtatgaactattcgatgaatgtatggattttggaattcctcaattgactgaattctccgttttgaaagattttattaagttaatgattaaacctgaagattattatgatgaatctcatgtaaatgatgaaatcaacatggtagagaaacaagttgaaactgaaatcaattcatcaatttcacgttcagctgttaataaaatatcttggagaccaaagggtattttctataacaaaaatgaaatatttgtaaattttactgaaaatttgaaatttaagtttaatcataaaatacataaggttgttattaatcaaattttaggtgaaattaattgtaaaagttatttgtctggaatgccaaatttgaaattaggtttaaatgaaactgttgatgcgacaaattcaatattcaataatatacaatatcatcaatgtgttgatttaaataatttatcagataatactattcaatttataccgccagatggtgaatttaaattattaaattatcaaattttgaatacaaatgttttacaaccattaatactggtaaaacctctttatcgattgtttaaaagaaatgacacatataaattaagaataaaattagaattagttacctacatttaaacgtaaattttcaatgactgatattaagattagaattcccttgattgttaaacatccatcactatttatcaatttcaataattccttaagatttaaaacaaaattaggaatcgtaatacatagcttagaggatgaatcaataatttggaaaattgaaaaactgcaaggttcaatgaagggcgaaatgcttgctgaatttgatcttatcactgaaaagcaattatatattacccatatggaaaactttagtagaggtaaacaacagaaaaatgatttattttactttgaactaagttcagaattgtcaaaacttacttcaggtaaatcatcaaccgaaaactatttcacggaaaaaaagaaactattcaataaggataatgataatatacttactgttgaatttgaattgaaaaatatgctttatagtgggttgaaagttgattttttgagagttaccgaagaacaattgaagtttcaatcatttccatggatcttgtattcagtttcttcaactggtgatgattattcatttgtgcttgcagatgaggagtttatgtcggatatatcagaagaagacgacaatttattaaaagaacaggtatacaaagcagaaggagaggaagaagaggaagacgttaaagaagtcaaagaagaagttgaagatgacaataatgaaaatgatattaatgaagaagaactacaagaatcggatcaacatgggcaatcagacattggtaataataatgataacgtccgtgatcatattggtaaatttaaattccagaatggtgccaaactagattttgaagaatacgttttatctgatgaagaatagataagcattatcgtagacctaatttatataatagaagtagcctatatacatatacgtttatagcccagaacaacacagtagaaataagaataaaaagagtatataagttgaattgaaaatcgttggaactttggcaacgtcatcaaatttcatgatgtgagattaaaacatgttaacacttctccagccccttgttaaaccctcttctttgtttagcaaaacgactacatgaagctacaatcgtatccattgaacgttggatatccattatatggtgctgcatttgcaaatgacaacaccttgattgttgcaggtggtggtggtgatggtaataatggtatacctaacaaaatgactgcaattttagttcaacctgaaaacaagaaaaagccaatcaaaagatatcgtgaacttacattagctgataatgaagattgtgtaatgtctttagatgttggtaatggaacaattttagttggtatcaatgaaagtccattattaatgtcaaaaggtgttaataaacatttacgtaaatttaaatttgaaaatgatcatttaaagtttgttgaaagttgtcaaatccatccaaatacaagttcaacaatctatcaaaaaatcacatcattatcacatgatggatcaattggtgtcattgttatgagtgatactccatcatctgtatatatcgtcgaaacaagtggtgacctggaagaaaagtttaagattgtcactgaaggtgatgtgaaggatgttacgatttctttagatggtaaattaatgtgttatattacatctaatgattttgaggttatatctttgattactggtcgttccgtttttaaaacaaagttaaactttttaatgtcaaaagttagatttttagataataatgaagttataatttcaggttctaaagataatggtgcatttattgcgaaattctcaatatcatcttctaaaatcattcaacaaaaggttgtatacaaaaacatgaaaggtataacctcaatggatgtcaatatcaacaataatttgacagttttagctacctcaagttattctttgattttagttagaacatcagatcttaaagttgttaaagtactaaataaggttcatgaatttgctattacaaaggcagtattttcagaaaatggtaaatatcttgcatcaacttcagctgctaatactgttaatgttgttgaaatcccagaaaaatttgcagcttctaaatcaattttaagaacaatgcttaactacattatttcaattttcttgattttagctctctcaattggtactcaatatttatactctaatggttacttgaacatcgcattagacaaagcattagcattatatgaatcatataaaccacaagattcttcaagttattttactgttgagtcagtttcttcatttgaaccatccacagaaatcaatcatgcatcttcagtcgagcctgttctttctgaaattacatctgatccatctgtcgtattatctaaatatgttacatcttctttagaagaacctttgccgtcaataacttctgagacagcaatttcttcattttcctcatatggggatattgccaagttgacagtgaatgatgatattattagtgaaaccacaaacacagaaacaacccagtctacggattcttttttagttaaagaggcaacatctgttgaagacattgattcgaccatgttgcctttaagcgatttgtcaactactgattctgaaaacaagaatagaattgaaactgaaactactcatgctagtatcaacactgagagtacaactgattcagaacagaaaactgaaaatgaaactgaaactccaagtgaaaccatggctgagtctgaaattccaacttcaacaccaactaaaattgagactcaatcattcacttcaattgaccaatctgaattctctgaatcaacaaatcttttttcatcgtttgaaattccaacaacttctgaattaacatttgaaaagtttacaagctctgaatacactattcctactacgactttagttgaaaaaataaccagggaaattactaaggaagttacgtcaacagttattgctaccaaaacagcaatttcaacagcaatttcaactgaaatttcaactgagatatcaactgaagttttaactgaggttttaacttctattgaattgctgacatcaattgaaacaagtacttccacgtcactggctgtatcaacagttctgagtgttagtacttcagttagtgtctctacatctatttatgttcaaactttatacaaagaagttcaagttactgttgaagcaacaccttcaccatattcatcatcattcatctcttcttcagttacttctaaaattggtattcaaattgaacctgaaaaggtagtttatgaagatccacttgaaggcataaaagaacaagaaaataaaattttagaagaaattactaatccatctactgttgaaattcaaattgaaccgatgattgaagtttatgatgatgttttagctggagagaaagctgcaaatgattatgtagttgatgaaattcttaataatttaaatgaaactgatgccgaagatgtttatattcagattgaacccaatgttgaaacttttgatgatccatcaaaagctgaagctgctcaagcatcgtatattgaaggggaattaaatattgaaaaacctaatttatctattcaaattgaacctgttgtcgaaacttttgatgatcctttagatggtataaatgctgaagcatcggcggtagaagaagaaatcaaagcaatggctgaggttgatacagttgttgatgaagaactggtctcgacatctacaattcaaataacagaaacagttactcaagaacacccagaagaaacttatgttgaggcagatagtactttactcgattcaagttcgtctttttcacttgaaaaagatgaattgtaattaaaaatagactgtttataattgtataacgactaaaaaagaaaaaatgatacataaatttgatttgaaaataacaataattgtcttatatttcacctgatttcttactgttacaagcaacgattttaaactttccaacatccaaggattcaccgtcatctaatttcataacaacatccttgatcacaaaagtccacacatcgtcacaaaatctatatgtgcttaaatgtcccttgaatgacatctttgtatttacatcacttttaagtttttctgaagttactctatcaaaattagccaagatcttcatagctagttgtggttgtattctttgatcgacaattaatgtatctaatgcatctgctaatgtagcaccaatcctgtacaaaacgtaaacccccgaatgggcaaaaataagttagtattttcaaatccggttaataaatgacataaatcagtgaaatcagttatacttacgtgcttcttctataaaattcgtaatatgatggaccgttcattatgtagttattgcttggtaaagaaggaagaagccctctggggttgaaatgcatgaaaacgattgtaatcacaaacttctcgcctacatgcaatattaaatacaaacttcaattacagagaaagaacttcttgtgactgatcgttaagcagtattaaacacaggtgataggtattaaacatggctgttatatactaccgttttttatctcaaaagccagatcatgttgccacaattaaatttgatggaacgggtttaacagtttttgaacttaaaagagagatcattatggtgaacaatttgatacattcaacagatatagatgttattttatatagtacagaagatattcaagctgtatcaatgtccgaaaataataaagagatggaagatgataatgaagttgttcctcgttccactactgttttggttaaaagaactatgtcatctagaaagggtagaggtaatgtacagagatatatggctggtaaaccacgtttgcatgttgcacaaggtggtaatagaagtgcacctaatagtgcaccaattattggatctgcagctaaagaaggtactgaagatgatatgcttgataaagttttcggtcaacaagatgcacaatggtcagaaactcaagattttatggctacagctactagaattgataattataaaccggcattaaatgagcctgttcctgaatattacatttgttataaatgtggtgagaaaggtaaacataatattaaaaattgtccaaagaataatgatcctaactgggaaggtgtccgtgttaggaaaactactggtattccaaagagtcagttgaaaacagttgcaaaacctgatgaaaatggaatggaaacttcagcaaatggtacaactgcatatatggtgaatgatgctggtaattatgttgttgctgttgcggatactaaagcttgggaacagtttcaaaataccagaaaagctgaaaatatggatataaataatggtgaaatagatgtagaggatggtgacttaaaggatacagaaacgggtaaattatggaagaatcctgtacgaacaccatgttgtaagaaaatatattcacgtaaaattattgaagacaaacttattgattcagatttcacatgtccaaattgtaaaaaagaagagatatatttagatacattagaaccggataccgaattacaagaaaaaattaaagaatatttaacaactctttcagaaaataaatcaaatgacaagaattctgtgaagagacaacagattaaccctgtcggtggtgcagtaaaccctatcaacatgccaattccaccaatgatgggtatgccaccaatgaatatgccgatgatgccaatggggaatatgcctaatatgggaatgccgccatttatgccatttatgccaatgccacaaatgaataacaatagtaataacaataacaataatgtaaataataacaatgctaataataacactaagtagttttatgtagattctaataataataatttataaacattcgtttaattaccggaagaatatgagataactgcccatttaccagaggaacaccaaagttcaccaacttcatttcctaattttttccagttttcaattaattcttcctctaatccttcaggtaaaccgacacagacatcagccttacatgttctaagtgctaaaatatgaatatttgaataagcaagagattcaagagcagttttaaatgatgtagtttttggccattctctatcgcttgttaattttctataatttaagtcacccttaacaataactaatgtagaatcttggaaatatttgtaaagttctgcaccgccaaatttatcatcaattggtgataatttagtataatcatatgcacatgtccaaaattcagaatcagctaacttgaattgaccattttgatgatatttttcaattgaattaacgaaataatctaaatcttctctatgatctggaaaccattccttattattcatatcttcaataaataatttataatctttgatcattgtatctgaaaccatccaaggtctagttttacagtggaatgtaacatttttaacaagttttgcatctaaaaggaataatgtgaatgcaagatcagtgtaaaattcaaaaccagcattatctaaaacaaagtcgattcttctttcttcggcaggaactgataaaaatctttcccatgcttcaggtaaatcattatcaatgatattttttgatgatttagctctagcttctttaccttgtcttgattgtatatcttccaaagtagcattagctaataatgataaatcggttgcattaccccataatgaaatatcgacaaactcttcaaataaaagtttagccttttcaatatctaaatgaccatttaaatttttcaactcttcacttaatgtcttgtatctgatagctaattcgtaaattccaaaagctgatgatttaaaagcatctcttttcaaaatttcaaaaatatcataatttgtccattcactttgttgcttaatgataacatcaagtaaacggtataggtaaccttcaattagtaaccatggaccatttaaccaagttggggtcttctctaaggtatctaattcaatattataagattctaaacttggaatcaatttgatttcctcatcggtaaactttctaataataccgttattattaaattcaagtaagatattatcaattccgtcaataataaccttaccttgttcaacaagcttatcattaccactttgtgcattaatgtatgcctcaactgtgtctttagcttgtgtaatgatagttggccatctttttctagcagttgcaaaagcaaaagactttggatcacttaattgataaacaccggggactgcagacattttcactacttatttaacaggtttaacttgccaaataagagaaagaaacacatatacatataccccatgaaaagagtggaaatgcaagacccgaaggttaaataccccaaagtgctaaagtgaaatttcaaattttcaattgttatggttacctaatgccatgttctgtggctgtggtataatatttttatgatggaattatataattgaatatatagtagtaacagtttatttcttttcttttctttgttgagtagtcctcttatatattgatcacttgcagttatactacaatacagataatgaccttcacagaaaaggaactggctcatttgaaggaggatatcctcagatttaaaatgaaattgaatatggataaagataatgaacaatatggggcatcaattactttaaatacaatgacaaatccagattctaataaaggttcaaaacttgatccaacatctcatggtgtctctaaattgaatttaaatcataacagatccaactataaacttacgtctgtagaaatttacgataacgatactgcaacttatgattctaaactggtttatgtaaatagggaaattaatgcagatacagaggaaatgattaaacgacaggtagaagaagaatttggttcagatgatgaagaagatggaatttatcaccatgatgataaattggttaatgattatgatgatccatacgtaactacatttaatgaaattttacaatctattaaaattgatgaacttttaaagccaattactaaaccttcagatgttgttaatatcaaatcgatcaaccgtatatatcaagacaaatatttggataatttatcttcagaaactataaatattattgaaagagaacaacaacttgtcaatttattgaataaaactatggatatattcctacatgatgatgaggaacatcttgcagcagataatttaggattaccagattatgaccataatttagatttggacaaagtcgaacaaaatggtgggaaaactgcacattttgatggaagtaatatgagaaatgatcctttctttcaaccttcaagctatacttcaaatccacaatttgatgatatagacccggtggaaatcgatgaaacaagacaattactgcaaattgcattacaaagaaacgaagagtttatcagagcattatcacaaatacgattaggattcttacgtgcagataattatagaaaaaatgtgtatgaatggtgtaaagagattaatgcaaatgaaattgcacaatctcaagcagcatctaatgatgatgaatgaaattttcatctttttattatatacagtatgtacaatagtcttttagttatcatgtgtttctttgttttttgttttatctttgtatattgatatattatatccttaattaatttttgttaaaacatcaactaaatgttatccatttctaaaaccttggtcatatgtttagcagtttgaatatcaccacctgttaaaggaataacagatttactcataacaccatcaaagaattcttcaattaaacctttgagttcagaaccagtttgacggaaatctggatatgcattaacctctaataaactaacacctttgtctcttgttatatcttcagcaactaagaaatctaattccataagcttcaaaagcatttggaagtggttggaaattcattctatcaatattaacagcagctttaaatagatctgcaacaattaaatgaatttgactgaattatattttgttttgtactatctggtaatgatgatttagataattcttcaacgactttttcttcagtttgatcttgtaaacaggtattggtcaaatggcctgtcatttccataataccatcatcattaacttcatttgttgtattaggatctgtgtatttttcagcactaaaaagcattaacattctatcgtaaacgtaaacatttaattgaccacttgccaagacataagttctgatatggaattttctgttgttataatcaggtaataataatggatttgaaatatattcttgaacaacaaaatgtctaagttgtgaaattatcataccagtattctcatcatcaccttcatcgtctgtatcatcctcgtcaaaggagtcaaaaattgtttgaagttgatcaattgtcttaaaaaggtgtataccttgacctttatctgtcatacttggttttaatatataagttttatccatcttttcttcagttttccattaaaacacaacgtaattcatagacttcatcaagagtatcatccaaaaattctgcatatgttagttcaaattggaaactttctggaaatgaggtctttaagatagattctggatgttttgcttgatacatagctatagtatttgataaataatgttttctaattaattgattttctgtaaatgtaagaattgacaatataattcttgtcttccattattctttcatgatcaagttcctcataatcaccataatgaaaaactttataatctccctttggtgggattgtagcttcaattgtggtatttgcaaagaatttaccaatagattttgataaaggttcataaatagtatgaatctttaggataagtaaccacaattcttaacttttcatcatcatttatcagtcatttttattctcagagctataaattaaaagttagtataatgtaaagttatgatggtatcgttttgttcaagcattatgataattataatcttactactctaattcgatacttaatttgttttcaattagataaaattattaaattatcacatattcttacaaacaaaacttaaacacaacatatatcaaaagagaaattctaatttgtttaaatatatttgacttacgattccagatctaaaatcatttcaccacaatgattttccctatcaatgtgtttaaagttagctctcaatgcagtgatagttgcatggccttgaccaacaactttaccatctgttaatccaacactagcatcaactgctttatgaacactatcataatcaggtttccatttgaaaacaataccatcactgacactaccatcaacaatatcaatatgttcagaacttgaattctttggttcttccttatgaaactaaactgttaccccattcattttccagtattggaacgtggataaattttagttttacctagtttaacattttcaactaacgggacattaactgtgtaaatttgaacatcatccttatcattccatgaatcccataatttttgaataatcttaatacttattaaacttgcctctgttagccattcagctggaacatttggaccatccacatatgaatatgaaagagcaattgaacgtttaccttgatgacaaccttccattgcaccaccaattgtacctgaagataatgcgtaaagagcagtagaattacgaccaacatttggtccactaagaacaagatcgacattgtcacgtccaccacacatatgattaacaccaatatcggcacacgttgcaggagtaccattatcaactaaacaccactcctttaaatcaggatttgatttatatttttcttgtggtcttgggaatggaccatgaaatgaattatcttctggtttagaaattgaagtgtaaataaatttaacagtaacatctttatctgcaaaatgagctttaccaatccatgatttttgtgaaaatggtacacaaatggttaaatcccaatcagtgtatttgataattgcacttacaagatacttaataaatggagatgtaagatcatttggaccaccatcgtcattagttaatagcactctcattttctattcagtacttagttgttgattgataagaaggtagatttacaaaataaacaaagtccttccaatttataacatcaattaatgcatgattctacttcttttgtggaagatttttctcttttgcagtattgccgagcgactggattgttcctcgtcagagataaatataactttcactaggcgattttttacattaaggacttcttcttgttgatttaataatcgttatcaattaattacagataacgaagataacgattattttgataacgattattaagtcaacaataaggtttgagtatatgcatatatgaaaagtattactaattagttaacaaaaaaaaaatctatatcttaattgcaaatttttttattaaattttattatatcttaaaatctaccatactcttgcacctgcaagtttttcagaagaaagatcacctaaatctttatatttaccatcaacctttatattgatctaaaagtttgaaatatttatcaaataagaaagatgaatctaatggaccaccctttgcttctggatggaattgaactgagaaaattggtctttctttatgtatcataccttcatttgatgaatcatttaaattaataaaatattctttataatctgatggtaaagtacttgcatcaactgcataaccatgattttgtgatgtaatatgacatttaccagttgttaaatctaatgttggaatgttatgtgctctattaccatattttaattttaatgtctttgcacctgctgcaagtgaaagtaattgatgacccatacaaatacccattaatggtaaatctggttgttccttaataacttgttttaaattttcaacagtttctgaacaataaattggatcacctggaccattagagatgaaaataccatcaaatttatctgcaactttttgaattggataattataaggaacaacagttatttctgcgcctcttgaaactaaacatcttaaaatattttcctttgcaccacaatcaacaactaaaacatgatgttttgcatttttaactggaatatggaatggttcctttgttgtaacttttgcaaccatattaactaaacctggatcataaaattcttcagatttatcattaccaatacttaatctagctaaacttgaaccttgttctcttaaatatgaaactaattctcttgtatcaacacctgtaattgctgcaacattttctcttttacaccaattacttaatgattcaactgctgtccaatgagaatattctaatgcaacatcagtaaccacaataccaacacattgaatatttggtgattcaaagtattttaataatgtaaaatcatcacgagcatttccagatggaacaccataattaccaattaaaggttgagtaaaacaaataatttgtccacgatatgatggatcagtcattgattcaggataaccaactaatgaagttgtgaaaactgcttcaccagatgcactatttggtgaaccaaatgaaagaccattaaaaactggtccacctttgataattaattttgcaggatctaaagttgtagttgatgaagttgctaaagatctagtgaagttagtctttaattgactatataaacttttctttaaagtattaaatgcgagcatgttgttaggtttgttcgattaattagataataaactaaattaaacaagatgttaaactacaagaaatcaatagttcaacatccaagtctttattggaaaatttttcgttgacaacttttcttttttgactcattttccaaaatgaattgaacggaccgcgctgtggaattacctaattcggtaagcgcgcttaagactgtaatcagtaagttaagtgatgtcacttttccattgatttcttaatgcttttggtgacttagataacgattggaaggtggaagctgtaaataaaaacatgtttctccctaattagatgaattcaaaagaattttgaacaatttaatggtgtagacttagcccaattaatggagagacaaaatttgtaattatgtatgcaacttatattgtaattttccttaaaaagcaattgaaaaacaccattataaaggttttgctgctttttcaatagcgtttgacacaattaaaactgttaaaaatgcaaaaaaaagtaagttttcgactaatatttatcttaatacatttttgatttcaaaatattttaatttttcaaaatcaaaattaatttaattaaaaaatttcttactactttttttccaaaagcttatgtgtatcttataaattaaccaagtcattatacaatacttttaaactcaattaaacaactaaaacaagagtaaaatacctttcacagtatgtctacactaaagatcaaaacaggcacgacacgtttttatgttgtacatcaaacattaccaagaaaagcgaatttttcacaaaaataaagtttccgatgccctcgtatattaactaatttcttactgctttccccttaatcactatcctttaaataaaatgattacaatggttaatagcaggtaaacattagaaacaaaatttacaaatattttttttctataataaataatctctaaaaaagaataaaagcataaaaaagtaaattaaagcagcaattggagctttttgtcccaatacaagcaaccattttgcttgatattaacacaggcaagcacactaaagttataaataaatttatatgatcaacaatttcctaatttagtgatatcacacttcaaatgaaatgatatgaatatattatactcgtatcaaaaattttgttctatagcaaatcatgtgtttaaaagaaaggtgtctttaatgattgggtaggaatctataatataatgatgattttgtgaaactttcaatccaacaatttcattatcttcaagccaaacacatttagtttcacgatttgtatgttctaatgaaatataactaccaattgaaaatgatggtctattattattatttttcctaaatttagtatttaatctattttccttaaattcaataagtaattgaattttttcaattttttcaatctgatatcttaatattatcattgaataaatatgaacatatttccaacttgttggaaatttaattctaacaaaattattaatgtcattggttcttttaggtatgattattgtagagcgtgtagtaaaactttcaacattttcaataattaattcatttgaactagttattgaatttttgaaaatgaattcttcaactttcttgaataatttaacatttaagtcatccattgaaacttttttggtctctttcaattgtatatccatatactctaatgaatctaagttatacattttaagataattaacgacattgattaaattaattctttcatgaatagtatctactccatcagtaccattatcattatgattactaaaaacttcttcttcactattaagtatttctgatattggatcagtcgagtttctaagtttatcaaatgataaaacatttaaacaaccatcttgctcccatttagaaaataaattaattgtataagacaatgacattttcaaaggctcaacaacatcaataaattgttcatccttaataacatgcattaaatcaaaattcagcttattcataccatcaactaacaattccatatcaaataaatctacgtattgacaaaaaaatattgagatgtaagaattatattccaccaagagttcaagaaatgtgaataatttttcaaatttgagatttgacacaggtgttttagttgtaaacatttgattttgaaagatatttaacattagtgggaagattgattgaatcaactgaagttggtcattgttgatatttaattggttaaagttattagaaattaagaatgataaagaaaatggtaaacctacctcattaccgatatcatccaaattgagtgcaatttttttaagacagttgctttcaaaaaagtttaaaataattctattgaagggaactagaataccattaaaaaatattttattaaagattgtttcattattatcaaataatagatttttttcagagttgaattgtttaaaattttggaaaattgaatgtgcatgatcaattttattttcaaccataaaatataataatcttactttaattgaatattcatgtttatttataatcattgaaacaattttctttcgaagcatatccacatatgtcgaaagatgagataaaaattgtttattctccattgttggattcaatgaattataaatcccaccaagaattagaaattcaggtttgtattttaaagaatctggtaattcatttaaagcaaaatagagtaagctaataccgttatattctttaacaattaaggtaaaagtgaaaacaaaatcaattttaaaatcagctaattcatgtaataaatttcgataaacattgctattttgaatagcaactggataaccatcatgaatatttgtaccttttttaggttttaaattttttctaaggtaccttcttaattgtttatttaacagtatagcaagaatgtaattatttagtaaaggtaaagatgaatcttttgaatattttgaagaagttgtagaagtatcatcaattaaatcaaatgacttaaagtataataaattattagaaaatgttttggaacctaatattttatccggtaggttattataataaataaatctaataatatttgggagtgatatatttttatgatttttaaataatgttaaacacatttcatcagcaaaagttgtaaaattttttatatgagttgttgaaacacgtaaatggaaaaatgtttcgtcagatttgattttctttttacccatgtgagttgctttactcttattattcttattcttatcatcaccatcatcatcatcattattattattattattatcgataagattattattaattgattgattattaggatttatttctgtaaattcacgtacttcatattgaacataattttgagaatcataatttgattggaaagcaaaattgggattaaacaaatatgattgatcaaattgtgtactgttattaaatcctattaattgtttttgatgatcatgatgatcatcattattgattgaattttcattagtgtgaagattatgattttcattatagtctatatgactatttgcagaagtactaacgtaagggaataaaatatcagaattacagtgattcttttgaatgtaattaatgggagatgaacttgatgggatgatgggctgttgatgggatgacagtggtagcggcgtcacctgatcatgttgatgttgctgttggagcgaaagttgtggcttccatgactgatatagctgattttctatgttattattatttaatgaattatttggttggggaaatgaatgactatttgtttggtctacgtgttgatctattgtagtagagaatggatcaatgaaagaaggagaaaaataattttgaaattgaaattgatttgaatgttgattttgtattggggaattattattttctgaatttatttcagtttgacttttagatagatgatttaaggtttgtaattgaaattgtttttccaaactcatctctaaatccgtgttagaattttcttgtttattctttgagcgataaccataatgattccatctcattatgagaatgttttcatgtatatagagctaaattggcagttgagaatcaattgaaaagtatgtatagtaaatatattattatatcttataaatatatcttatctaatatcttatattaaaagattgtaaagttatttagacaggaacgtttgtaaacaattgataaataacatagtataatatatggggggaatctcgatgagagtaagatttacagaaattttggaggaacgaagtttttaaattaaaaacgaactcgtaatacttaatagaaacaatacaaaattacaataaatttaatagaataatttaacaatgtaacccgctaaggattaatagataaataacaaaaaatctgtaaacaagctattttttgtgaagacgtcataggggatggaaagaagcaattttatttctttttacgagtgttacatactagaaattttataattataattatgtaacgaagtaaatctgaataaaggggaatcatcgataccccgttatcttttaaaagtctattgttataatagaaatgaaatagaagaaaaaagaaacaaaaaggagtgtaactatatatgaagataacgtttaggcgttgaaagccatgtattaaataagaagagtatgttgatgtagagtatagtagaaaattaacgttactgggcaataaagaataagttgaaaattagatttatgatcagtcgatacattgagagaatttctgaatgaaatttttaattttttaaaagggtttaatcgatgctctatttaggagtccgactgtattggtatattgaaaaaaagcatctaagcctccttgtaaagagttagttacccggagtgagaaaagggaaaaaaggacgcaaataaattttcaatttttttcaaatttccaattttcagagaaaccctcaaaattttaattatttgaaaatttttcactgagaaaagagtgttttgtgaggatattattataattatagtggaatttgctttactacagttttcttcacttttacttttcatttactttattactccttttatttccttcttcctttcaggtgcaacacttagtgttaattaactagtaacttcaatatgtctcacagaaagtacgaagaaccaagacacggttccttaggtttcctcccaagaaagagatctgctatgcaaagaggtagatgtaagtcattcccaaaagatgataaatcaaaaccagttgctttaaccgctttcttaggttataaagcaggtatgactaccattgttagagatttagatagaccaggttctaaaatgcataaaagagaagttgttgaagctgcaactgttgttgatactccagaattagttgttgtcggtgttgtcggttatgttgaaactccaagaggtttaagatctttaactactgtttgggctgaacatttatctgaagaagttaagagaagattctacaagaattggtataaatcaaagaagagagctttcttaaaatactctcaaaaatatgctaaagcaggtgaaattgatactgaattagcaagaattactaaatattgttcagttgttagagttttagttcatactcaagttagaaaaactccattagctcaaaagaaagcacatttagctgaaattcaattaaatggtggttcagtttctgataaagttcaatgggcaaaggaacatttcgaaaaaactgtttcagttgattcagttttcgaacaaaatgaaatgattgatgctattgcagttactaaaggtcatggttttgaaggtgttactcacagatggggtactaagaaattaccaagaaagactcatagaggttcaagaaaagttgcatgtattggtgcttggcatccatctcatgtctcttggtcagttgctagagctggtcaaagaggttaccaccacagaacttctattaaccataaagtttatagagttggtaaagcaggtgatgaatcatctggtgcaactgatttcgatagaactaagaaaactattactccaatgggtggtttcgttaaatatggttccgttaacaacgatttcgtcttattaaagggttcaattccaggtccagttcaagagagttattactttaagaaaatcattatatggtccaaaggatagaagagctttagaacaagtttcattaaaatggattgatactgcttcaaacttcggtaagggtagattccaaactccagctgaaaagcatgctttccttggtactttaaagaaggatttagaaaactaaatctgatgtctttatagtataaggaaatcaactcttttttttaactatctctttattatttaaaatgattgattagtttactagttttttataaaattttgtaatttgtttattatattaaattgttgaaagataagttaaagtatatcaagtataatcttcttttaaatttgcgagaagtgtccaaaataatccgattattacgtattatctgaatctattaagtcctaattccatgccatacaatacgaaatcaaaaaaatttctcggtggtgagagtgaaaaatttttcatttgtgaggaaaattgccacttttgttatacagtgttttaatatagtggatttttacctcttctaaatctataccttctgatctcttgtaatctttctttgccttgcttctatttccttttatttataatctatttcgattcctattggaaacacatataattgtataatatgagtgaagaaaatacaaaaccacagacaagatcatatgtccctcctcataaaaaaggtataaaaccagttcctggctcaactcctttatcatctaaatcttctggttatgaatcaagaagtaacagtggttatggtggttatggtagaagagatggtggttacagtagcggtggttacggtagatcatcatatggtagtagaaataatagtaataataatggtggtaattcctcaagacctccaagaggtcaaggtagatgggttgatggtaaacatgttccagctgcaagagatacaactttagagaaaactttatatggtgaagaaggtgattctaaattccaatcttctggtattaatttcgataattatgacgatattccagttgatgcatctggtgatgatgtccctgaagcaatcactgaatttacttctccaccaattgattcacttttattagaaaatattaaattagcaagatttactagaccaactccagttcaaaaatattcaattccaattattagtactggtagagatttaatggcttgtgctcaaactggttcaggtaaaactggtggtttccttttcccagttttaagtgaaatgtttaaaaatggtccatctgaagttactgaagacaatagattttctaaaaataaggcacatccaaccgcattagttttagctccaactagagaattagcttctcaaatttatgatgaatctaaaaaattcatttatagatcatgggttaaggcaacttgtgtttatggtggtgcagattttactacacaagttagaaatttagcaagaggttgtgatttattagttgcaactcctggtagattaaatgatttattagaaagaggtaaaatttctcttaaaaatattaaatatttcgttttagatgaagctgatagaatgttagatatgggttttgaaaatcaaatcagatatattgttgaacaatgtgatatgccacctgctaatgaaagacaatcattacttttctctgcaactttcccaaaggaaattcaacatttagcaagagatttcttaaatgattatattttcttatcagttggtaaagttggttcaacatctgaaaatattacacaaaaaatcatttatgttgaagatggagataaagagtctacattactggatattttagcagccgatgaagaatcaggtaatggtttaacattagttttcgttgaaactaagagaatggcagatattttaagtgattatttatattcaaataatttcccagcaaattcgattcatggtgatagaactcaaagagaaagagagaaggcattagaaatgttcaaatctggtagagaaccaattttagttgcaactgcagttgctgcaagaggtttagatattccaaatgttacacatgttattaattttgatttaccaggtgatattgatgattatgttcatagaattggtagaactggtagagctggtaatacaggtgttgcaactgctttctttaatagaggtaataaaaatattagtaaagatttaattgaattattaactgaagcaaatcaagaagttccacaatttttaagttcaatttcaagagaatttggtagaggtggtccatcaagaggtagaagtggaggttcaagagatattagaagatctggtaattatagaagtagtggtaattcatcatacggtaattcatacggtaattcatcatacggtaattcatcttatggtaattcatcttatggtaattcatcaggtggttatggtaactcatcaggtggttatggtagtggacgtcaatttaattcatcatcaaacaccaactccaattcatcatcatcatcatcccaatggtggtaaacaaattgagtagaaaaaaaaaatcatataataaatcaattatttttctcattcatttaaattattaactgatttatttaaaatatttttactttctattcattctttttgttcaatatttcatttttattcaacttatttttcttatttcttaatcatacaattttttattcaattttattcaatttaccttttttggaacttcttagaagaagtatttgtttcaatttcaatttttcaaaaatttcaattcaattttggaaatttcattcgatgacaaatttagggtgaaaaaacttttaaaaatatttgttttgatgattaaaataaaatcatttcaattcaattcaatctaattcaattataatatatatcatcaatttattacaattattttcatttcaaattaaatttttcttccaattataaaacaaaaacactacagattttttccaattcatacaatgaattttttaatctgtaatatgttacatttgaatcttttctacctatacaagtacatcggtttgcttatttgcgttacaacaatttttttttcttcatattgaatttcacgtacaaattatattgcaacctgaatagttttaatatttatgatttcgtgttttatttattcaaatttttttaaagggtaataagcattttttatctaattcatatagacacacacatagtctacttcatcatctcattctcatagtattctacctatttaagttttatataaattactttgtgctttttctataaatttatagaatttccaaaacgttttttgttatgtaaaaattcaatctttgaatataacaatagtttattcgataaatattaatataatcaactgatttgtgattatagtagcaactaaaaccatcatcagatggattaaacattgctttgatcaatgaacaatataccacattgtgtatattttagaacttaataaattcaatgaatagccataagtcttatgacgtaattgattataaaaaatgctatagactactttccaccatgttttatgtgattctctttctatatattctgtacaatgactctccaaaactttgttacagctatacaaagtgggtccactgtattccatccaaccaccgacaaccacatatcttacataccttactataaagctcaaacaggcaagtagaatactctctcagggaaagagatggagacgcggctgtaattgccaaatagagagaaaaacggataatttccaccctttaatttactatgtaactatgacggaactgtaaaattgcttatacatggaattatgaaaggagtttgtagacctgggaactgtattttctttctttccaaaggagagcccttgtactgatatattgatctattgtttaactaaatattcactgaaggtactcatatcaccttatctatattctcaactatataatataccttatagtacagttattttatcaaagaaggtttattcacgattggtacctttcctttcattccgaaaaaattaattattttaaaacagaatttttctctattttagatccaatcatatagataatacacacattcacaggaatcagcatttattataattcttcaatatgagttcaaataataagaataaattatcagttaatgcacgaactaatccaaggttcggtcatcgtaaaactcaaagtagttccggtataggatcttcatatgatgatgtgtctgatatgcaatcaatttattcaaataattcatttagttcagttggtaatttaatgtcaaataataataattcattttggtcattaaatagatcaaacgaatcacttcatagtttacctgatcaatttcaatttaacagtaataagaaatcaacgtcaaatatacccaaatttaaaactaaaaatgccaagaaaaatttcctgttaaacttaaagaataaaaataaacaatcattaaaatataatagtagtactccaccagcacttgattctcatattatagtggaagatgatgaaagtgaacaggctttaaatgttccaatgttacctgcttttggggttagtggtaaacctaaaaatattatcaataaaaataatataccgcccccaagatctgctgttcaacatgattattttggtaattatccaaatacacagaatgttttcagtgacaataataaaataaaagataataataatacacctgattttggttttaatgatgatgatcaaatatcaaatgaagaagacaaaatcataaaatctatgatagatcaagattttaatttgaatttctcaaaagattctcaattaccaaaaggtagtaaacttcaagaaatcagaaggaaaagagggttggttgaaaaaagaccaataagcagattaagtagtagtgatgatgatgcctcaactgagggtgaagaagattatgataatcaaccacatgaatacgtttcaaataataatgataacttgaatgataattacatctatcaagtctgatacttcaagtaaatcaaagaaaggtatattcaaatcatttcttcgtaagagaggattttcgatcggttcagaaagtatgaaaagtgggtctggtgaaaaaaatagtctggaaaaaatagaatctccaactatgggaagtccgttaaaattaacaaaaacattaagtaggagttcttcaagaaaaagaagaaataactcaatttcaattcatgaacaactggataattattcaaatgaaaaaattgaagatagtacaagtttatctgaaaaaaatgaaggtacagaagcaataaatagtattgggccaaatgatatctccgatgttggttcaaataacagtaaaagtgaacattttctgaaaaatattttccatctcgatggcctgttaggacaaggtggtttagtgcctaatttaaatcttgctcataatcaagatacaacaattagaagaggtgatcaagttcatgatgtagaaaacccattacctgatttccatgatgaagttgaaagagaagcaaaaactttagttggtcatatgtttagtagtcctctggaagactttagaaaaaggacgaaaaatcgtacaaataaaataaaaaattcttttaatggtaatggaggaaaaaatgcaagagagacaatcaaataatatatctagaacatctactggttcaagtactggactttacgttcctgaacgtgctcatttacctgttgatccatttgatgatttacaaaattttgatgaatttagtattgatgttcctgataatattatagataaaccaagaaaatataaaacaggtattcaatctgctcttttacaactttataatactcatctgatgccagcaaatatttcttcaacaaattcacttgaaggatcaacattgtataatgattcagatgtcaattatgattcagatgctactgatttacaaacagattataatctgaatatgaacctcgatgctgagataagaagagacggtttgcagatattacatccaagctcaggcggcaacacttaattctgaatttcctgaatttgaagagaagatgaaaggtatttctgaagatgctgaagcaaagtttgataaaattgataaattctccaaattccataaaagagcagcttctttccaagattttattgcaaaacctgatatgaaaaaattgaatatctctaatatgtccagttcaaatccaaagagaaaaacaggtgtaagttttgaattaccagattttagaactcaaacaaccacagctgatacaccattggagaaaaaggaactattagggtataaaaatcttaaaaaaagagcaaaattcaatagaagaattaaaaaggaaagtgcagcacgtattacagttcatattactgatgttcttgaaagacaaagatttattttaacattatgtaaagcatttatgctatatggtgctccaactcatagattggaagaatatatgtcaatgacatcacaagttttagaaattgatggttcctttatttactttccaggttgtatgttagtatcatttggtgatttgaatgcacgtacatcagaaatgaaacttgttcgttgtgcccaaggtttagatttaggtaagttagatgaagttcatgacatttataaaaatgttgttcatgatagattaggtactatcgaaggttataaactattagatgagatcatgaataggaaatccaagtttaatgcatggtggtgtattctattttactcattagcttcactggctgtcgcaccttggtctttcggtggctcttgggttgatttaccaatttgttttggtattggtgccgttattgcatttctacaatttgttatttgtccgaagaatacattatattcatctgtttttgaagtttgttcaagtattattgcaagttttatagctagagcaatcggttcaattaatggtgggaatactttttgttatgctgctttagttcaaagtccattagctttgaattttaccaggttatattattctttgtggttcacttgaacttcaaagtagaaatattgtggcaggtagtgttcgtatgttttatgcttttatttattcgttgatgctttcttttggtattactttgggtgctgcattatatggctggattgataaagatgccacttcggcaacttcatgttcttccaatatttctccctggtatagatttttgtttattccaatgttcactataggtattgcacttacaaatcaagcatcttggtctcaattacctatgatgtgtattatttcaggttgtggatatgttgttacttatttttcgtcattacactttaagaatgttacagaattaaatgctactttaggttgttttatcattggtttggttgcaaatatctattcaagggcactaaaatcattcaataaatacttcacaacaagaggtacatttatgactgtctcattgatgcttcccgctattttcgttcaagttccaagtggtattgcatcgcaaggttccgtttttactggtattagtactgctaacaatattactcattctaataatgctcaggatgtttctggcgatagtggtactttaagttttggtattgttatgattcaagttgctttaggtataagtgtgggtttatacttaagtaccattttggtttatccttttggaaaaaagaaaacaggtttatttactttatagatttttatattaaaattgtattagcatttcgtaattactcaaaagataatgattgatcaattaattacattaacattaaccagtttcagaataataattttgtataggttacttatataaaactcaaataaatttaaattcaataactttcgtagattaaagatttaactctgtagtcttcgtttgcttcttctatatcttcccaatttccaataaaatcatcctttcctctgacaataccaggcaaagttttaccacccgagtaacgtttccaaacatttttagcctcaggatttgtacctaaatcacaatattcaaatttgattctgttggcagttagaatagtttctaaacgattagtacgagttgcaacatggaatccaccagcaaatgatgtgtataaataaacaggttcatcttcaaaagtcatcttcgttacttttggaacatggacggaaccatctttacccagatgcgtatttgaatcttgaagagccttttctcttgcagcagcagcaattaaagcgtcgatattgtcttctttaggtatacttacaggttcctcttctaattgatgttcttcttcttcttcttcttcttcttcttcttcttcttcttcttcttcttcttcttcttcttcttcttcttcttcttcttcttcttcttcttcttcttcttcttcttcttcttcttcttcttcttcttcttcttctttcttcttcttcttcttcttcttcttcttcttcttcttcttcttcttcttcttcttcttcttctttttctctttatcactctccagttcctctttagattcattttcaacatgctcatcataaaccttttcaatttcttcgatttcttcttttgattcactgagtttagaaacattttctacgtcattaactggtgattcatttttaatttcaacaaagccagaaatatcattttcagtttttgcactttcagtagtctgttttccgactactggggaaacatccggtagaacattaacaaaggattcagtttctgatacacttgttttgatttctttagggcttaaaggttcagtttcaggttcttttatctcttctgatgttattgacttagtttcatctttggcttgttcaggttcaacttctttatgtacctgtacaacagggtcaacgatatcattatctgcattaacaacttccttttgaacatgttcattactttccaaattctcaatttttttagacttttcttcagtttcaatttttggttcagaagttgtatcgtcatcattatttttcacatcttgatcattgtcttcttctagtatttcttttgctggaagtaacttttcgtgctcactagtattgaatttttcctcagctggtgcctcttctacttcttcttcttcttcttcttccggctcaagaacatttttagcatcttctgtaatactactttctataccatcatccttttgttcttcttttttttcttcttttggttcttcttcctttgatttttcttcctttgattctccactcacttcttcattcacttcttcattcgctccttcacctgcttcttcatcaatagctgtatcatctttttttgtattatcaccttcatattcatcctcatcttcttcatcaacatccatcaattgtaaagcaggtattggctaattgatccagtaaatcagaagtactcaatgttgtgcgattgctcgcatcttcttcctctgcaacttcagctaaacccttttgtagatcttttacaatatcatttgatttggaaatctttttaccatacttgactgaatgagtatcttctacaaaatctaaagctttattaacagcatattcaatatctggagcatttgacatttcatcatcattaattaatgcaccactttttcttaaatctatactttcaagacgatcatcattggtaaatgatttacgttctttggaaacccttgaacgtgatcttgaaatagaacgtaaataacttaaagaggaagagctcgcaatttttggagctgatggatcatgtcttggtcttctttcagaaactaaactgttggatgatttgtcataagtttcagtaattgcattttcaccatttaatccactatgaatagattcacctcttgctaaatttggtctactaaatgaatcttgatttgaaaggtctggtcttctagaagatgatcttgatttctgttcttcaagtaaaatggattctgaaccttctctcattgccgctggtgcagtgaaactggagtcagtctcaattgaatgcagtggtacttgtggatcggctttcttgtcacttatttcatcgagtgtcagtgcttttgccggaggacaaataatatcagcaattttatcgtcaactaaagtagtggccttctcgaactcaccttgattaacaacattaataatatcatcaacactacgcatgttatcaggctcaataaattcaggtgcgtcatgttctagttctgaatgtttgccatttttcttttttgtttgatatttgtaattactagcaacaccacttgcaggaacaatatattgttcagcatttccacctaaaatactgatttttttaatatcatgaatgttatcttccttttgattaatattattaagttcaattgtacttaaaggtgtagccttagtttgatcttccttcattttgataacatcaggaatggcatcatttttaatatgtccatcgttatctaaaacatcgactaaaggaacatcaatatcatcattaagtaaagcaccttcttctttaatttggtcaacatgaaactaaatctgctgtagaatcagttgctttataaacaaggtgattgtgattatggggttgctttgaacttaatgatttcaaagtggggatagtatcagaggaatctctaattgaagaaccaatcaaagatggtgtttctgctctatctgtgtcattaacttcattatagccatccatttttaataatctctattgctatatatacaattatctaccaatgtgcttgctctatatacaataataataatatagctgccgtataacacataaaaaagcgcctgtttcaaaatgtcatgatactgaggtactatacgcatgatcccgagacagccacaagcgtttcaaaaatattatctttagcaaatctcatcgtcgtcgcaataccttcctgtttaggaatggttatcttttgataattatcgatgttcattatcactgctgaatcactaactctaagctaatatctcactctgaatagtataccgattcatgtatcaataaactaagagataaactttatctgattaacttatctgattaactatatattttaaatataaaacgttttttttgataaaatgcatgcaaaaatttgtctaacaaattcaaatgtataaaaaatgctactaaaatgtttatttagcttcctttggagcaacaagaggactcaatcttagcaattgctttagcaatatcttcagccttacccttaacaacaactgcatcactttcaacatcttgtcttggaactaaaactctaaccttaaattcttcttcaatacctcttctaacagatccacctgaaccaataatcattctatgttgtttctttggaacttcaacagtttgttcagtaatactttctaaatcagcaacaattttcttaattgcagctgatgatcttaccaacaactactttatcaccttcacatgtaatagtatgagaatctgaattacgtgcagggaattgaatgaaacgtctgaaatcacgatcattttctgaaccaccagctttaatgattaattcacgcatagccataccatttggaccaataatatttctataccattttggatccacatcaatagtttcagtaacaggtattgacaatacgtttaacaattgcatcaatttgagcctttgcttctttgataccagctttggaaccaataagttcaagggtagcagtactactttctttaccttcttcactttgggcgtttttagagtaaatttgaatacctgcatcaattgcaatacccttgatattatcaccatttttaccaataactcttggaagtgcttcagttggaatttcaataaattcagtaaaaccattttccttttcatatgcaataagttgattaatttcttcttcaactttcgcaacacctcttgatggacctctgataacaacattaccattcttttcatcagattgtgaaaattgaagtttaacattgtatttatcttgtaatctgtttgcataaacaccatttggaccaattaattgtttacggtatttttgttcaatattaatgatactagtcttttcatcagcccatctctttgctaattgttgaattttcttgatacattcatcaacatttgattttaaacctgttaatttaatttcagtattttcaactttatcattttcatcacccaagacatcgattctgatattaaattcatccttaatttcatttaagtgtgcacctttttgaccaataaatcttggtaaatatttggttgggaattcaatagtagtattgtattttgatgcttcttcataatttttaacatcttcaattaactgtttaatatcatcaattgctttactaatttcagtcttgtaacccctcaagtaaatttcattatcagaagaaccttctaagttaggaatataacttgatttcgatagtattatcttcatatttgtttaataaaaccttcaaagtattaccttcaagatgtttttgatcgtcctttgaagtttcaatgacttcggtaattaattcattgtttaattttcttaatgaagcaaatgaattatcaacattatccaacttagcttgaatttgttctgctgatggtaagaattcatcatcatcttgttgaacaactaataataatttattaccaaaacctgctaaggaacctaatggaataactgaaacattgttttcaatcgcaacggtattatctattttagggaaaatgaatgattcaatatcttcaactgacttaacaaaatttggagtaattctgttaacagtatcaacaactgcctttctagctttcttgatttcatccttttgatcctttgatgcactaaatgaaactaaaacattatgaatatttggatccgctaagttagcatatgatggaccagcaatcttaataccatattcagaaccaagagattcaaaaagtttggtataaataaagaaagcagtcagattctttgcatgttgatagttaccaccatgagatttagaaagatctaatgtgtcaacagtatattcagaagttaatgatcttgcaagttcaatagcagaagcaatatctgattttaaaccaatgaatttaactttgagggaggtatcattatcctttggcacttcaacaacaacattagtttcagcgaaaatcctttcagcattgacaaattgatgtaaatgttttggaatgtcacgttcatcaacaataattttgttatctaatgtaactaataatgtcttaatttcattacgtgcttcaatgacaccttctcttggaccagcaattaagatagttgaaattttagaggatggttcaggacaagtaacttcaacgtctttatcaaatgataattttgcaacattagcagcaacgaatggtttaaccttttcattaactggaattttaacatttaaagttttaatgttttcattaacaatttctaaaattctagccttagcatcagtacaaccttgaatatcaccttcaacagtaactaatagagatttaccaaataattcttcattttcagttaataatgatgaatcattttcatcatcattatcatgtgattctttagcaatatcaattctaacagaagtagcttcaataattggtcttaaggttttaccacctgaaccaataatagttgatcttaattttgatggaacttcaaaggtaattttagttggtttagttaattgtttaattaattctttctttgcaagtgtaacattttcaattggaccatctaaaagaaaagttcttctcttagtggtactagaataagtagattcgattttaacatttaaagaagcttgaattttagcaaagattttgaaaatttcaccctttgctaaattttgttgttgttcatcatcaataataaaagtaacttgagtagaagttgatttaacagcttgtttaaaagaattcttgtttgcctttaaagatgaagcagcagtaattgaaggaccccatgaagaagcagttgaattactaccacctaatgaagggaacagaagatcatcattcatagtaacagctttagttgtttcaactttagaaatttcatcagctaaagtaggaacattttcaccatcaattgattcatcagtattagatgattgaacagttgatggttcagaagtaaagacagaggattcagtagtagtagttgcagattctaaaacaggagattgattaatttcttcagcttgaagcgcttcagcgtgtttcatagctaataattcagcaggagaagacatttttgttcaaaaaattggataataataggatataaataacaaccggcaaatgtagtaacgtaaatggatattaaaattagtttagacaataaatataatttcaatctgtaagtactttaatatgatactttggatagaagtgatagttttcttgataaaataataaaacaaatgtttttcaattaaaaagaatgtttatagactgagatcaactaaagagcagctagagaaagaaatataagtaaaatttaaagaataattgaaagaaatcagaacagaaattcagcaaaaagattcaaatagaacgaaagtcgatattcatgtcctgatccgttgcaaacgcaatagcacttgattaactgtggccaaaatttccatcactgtaaattttattacgtggcactgtttgagtagtggtgtacagattatgtatttcctaaaaaagtatcacaacatttagcttgtcgtggaattattatcactctttggaatcattcactggttaatcattgattaatgatggatatgattaattacatcttttgaaagtacgaaccaactagaaatccaataacatagacgcatcctttacctatcgctaatgatccaatctcaccaaacatggtaagtatcgcaggaccaggacaaacaccagacataccccaaccaataccaaagatagcattacccatcaaaaactttacatctgtagcattactgaagtttaaatcatattcagattcaaaagctggtttttttcttatagttgtttccactttatttgattcattaactactttttcaacattctcttctttagaatttggtaagtattttttccatattataatattaggaatgatacagaataatggtatcattgctaaacttggatcaaaatcacgtggtgaaaataatgataagaagcccgtaactttactagggtttgtcattcctgatatcaacaatccacaaccaaataaaaacccagaactgactcccaatacgcctcttaatatattcttattcttcaatctattaaatctctcttcttcaatcaaagatcccaatcttggtaaaatagaatacgaccataactgtccaacaattaccaatgtaagaagtaatacccaattttctttgaaaacgacaaattcatcatcataccaataattaggttctttatatgattcaatttgcttataattgtttgtaatccatgtggtaataacaccagttgtaaagaatgtacatgttgcaataaaacttctccatcttaacctactcaaccctgctaacatatgtccacttgtacaaccacatccggcactagtgccaaaccccactaaaagaccggaaattaagtaactcaatgcagatccatagaaggtacttgtttttgttactgctggagaataagacgaaacaaatacaggtaaattatgcttaacaaactgagaggaaagtagtaatcctgtcaaaattgaaactgtatgaatattgggtctaaaaattgaattgtataatacggaagaaaatccaatgactttaccttctaaaaggatataggaagtagtagcagcttgaataagtagtgcacctaatgctgattcaattggcgtgaacattcttcacttagtaaggaagaggttaaaatgatttgtcattaatgatttagtattaaatcgaattttaacttcaaacaattatttcggagaatggaatatatatcggtagggggtttgaaaaggttttttacagaaatttcattaatacttaaacttactttaacataatatcaaattgatgatgtctatataatatttatgaaacattttagtaataaaagttacatagtaggaaccatcttaagctctaatttcttcttcccattggacaccacaccattcttcaatataagcaactccattttcatccatccagtttaatggtacaacatcttcagaatcagtagcaacaattatagttccccattccataccattcttcattatatgtgttatatcattaatatctctttcaagatcaataatcatctttggcattaattgtaattcaaaatgacgatgtcctgatggattataatctggggatggaatgttccattcagattgtttctttaattttccattaccttcgtaaaaaatattacttactttatcctttgaagaatataaaattggtgatcctccaggttcatatcttacaacttgtgtagtattataagataaaactctcgtaaaattttggaatgtttgatcatcgaaaagtttagcaagatcttcggtttctttgtttttttcaggattgattttaggtaagtttgcagattttacattatcagaggatgtagaatcttctataatagtaccttcatcatctatttttaaattatcaggtaatggagctagaacttgttttgatgagtctaatttttcagtttcaaaatatagaatgaaacccttaaattccggtaatttgtagttcacttctttcttctcaacttttattttatcctttggttttatattagatttagcaacttcggaaaatgttggaattttagtttcagaattgatgtcattaacttcttttttcaattattagtttcaaacacatttttagaaaatggattatttgtacttgaaccaaatggattagcaccaaaaggatttgaattttgattatcattagaaccaaataaatttttaactaaatttttagtttcttcttccttttcagtaatcttttgttgttttattttttcttcttcaactttctttttttcctctgattctctttgttccattatcaatttatcctttttgatacctctaattgcacgtattgaaccatctttacgacgacatgatgattcaacacaaatgaaaacgtataaagcacgatcataccaagtgcctggtaaatcagcactacattgtgttaataatctcattggtttggaacatactttacaatgaacaaatttagatggtattggtgaattaacatctattggaattggttgtcccccaataaatgaatcttttggatatactggttcctcttttgatatttcaacatcaacataacctagtaacgtatttgtagtaactactgctgaagcaatagattcgttatcggactcgtacgacattattgtctagattactgaacgtagctgctactctttctatatataatttgacatcaattcaaggttaagtaaatttactcagttgaataaaaatatttcaatttttttttcacagtcttgcgagagcattattactgtagttacatatttcttagcgaaacaatcagggtcctagcaccacagtgttataatcaaggctatgctttactttgaatatagggagctccacattattgaactgaaactaggtacattttgtagttactgaggatatcgtaaatttaaggattttttacattcgggttgatagatactattattttaagaaacattgcatcattcagtgcccttattaatattttcctatttacacatattgagattactctccggtaatatatacttatcggactccttcttttgaatgtattttttgtttccaatattccattgctataattctactaaaaataaaccccagataagctcaagattagatggctactatctaataaacacacctttatttgtttctcacgttttaaaagaggttaagaaaatgtgtatttatatcgttttattaggtgagttactgaaaaaagttttagattagttcggcatgtaatgatattttaatctcatggttatgagttcacaaattacatatgctatatattttcctttgaatgatttgtacaaatatctctttgctgcaaatggtatcacaagtctagccaaataaaataatagaggttcaattatcagaatgacgtcttattaatgagatgtgataagtaaacggacagaaaaataaaatcattttatctttctcagaatttaagctctaaaattctatacatcaaaaaacttgtcaaaatttccgtaaatgcaaaaaatgttctttactatagttcattaacactgtatatcatcaaaggttccttttgggaactgttctattgcttttaaaaacataattaagctgttcacaattatattggcatcgaagtttaacattttttaatgtacaaccttctaccccttaacgtttgaatcaaaaaagctttaatgttatacactaaaattgcttatttatgttagtaaatgaattagatatttccgttgttggttccatgttaaatcattttccaggttataaaaaagctgtaactgaagtgctaattgaaaaatctttattagaggaaactccgaatatttcattggattttatagaagatagcagtatttatggagcagcaatttcagctttaattaatgagaaaaggaaccttatataatatataattattctttgtaaactattactataagatcaacacattgtaaactaattaatcaattataaacccaaaaaatattcaactttataaaaaaaatgtataaaaaaagaggtaataatataagaaatttatttgttttgccgtaatttgttttgtcgtgaattttatatagtgaaaaccttgaaaaaatataccgtctgtgtaacttagttaatgttgatatgataaccaaatcaatattaattacctatttggaatttccattgatgtggtataattgaatgaaacaaaggtggggccagtttaacttgggctcgatgcgatgtttctaatatttttggctgtgtatagtaatttattatagctatacttctttgcatgattttttaggtaccttacataatttggaataaaaataattatgttttttctatcaatgtttcatttcgttctatcaatgtatcatttctttctttagacaacacacttcaagcttggatatcttttataggtaaaaaagccgattgttttatggaagcatttcgttcaagttttgaaactctacttgttcttttttctttaacttgttaatattctaataaaaattctaaaatcatgcgggagaatatatcaaaatcagtatttttcgaagttaatcaaattatgcattctgactttatatttttttggtttacttaacggagtaaaccatttgtaaatctagctttactctaccatggatttccaaatatcccaaaagtgtcgattcattttctaggtttgcagatgtctataaattcaggtgcatttctttgacttttagctgaattattatattctcctaatgattcaaattatagttttagttaaatattttaatttttgacttcaaacaacggtaaaaaaatattaatataacatacaaaatggatcttctattcagtttcattttacagttacttttatttacaaacattataaacgctactgatattcaaacttctgttgtcggttgtgattttaatgcaattcagtcagagccaggtttcaaaggtgtcttttatgaattttctgattccagaacagatgaaatctcagatgtaaaattttatggtggtggctatcttactggtagcattgctggaactacttccaaaattacagatatcaactttagtgttccaggtggtgaacaaaacatctatggagttgatgtcaactcgtccaatttagcaattgaatatacaggttacttcaagggtaagtactaataaacaatcagttttcttttcataaattaacaaatactaacattacttatttattatagcttctcaaagcggtttacatgctttcaacttagctaaggttgatgatggtgctatggtttttattggttctgagtgcttatgactgttgtacaccaggtgctatcccagaaggtggtgccgatactgctgctttatattcatacaaaggttggaatcaaccatctaacccagttactacatggatttattttgaaaaagattctttctatccaattagaattatttatacaaatgctattactgctggtggtattgaactttatgttaccccgccagataattctgctcctttaaatattggtggtatggtttatcaattaacaagtgatcctcaaaatgtttgtactcctaaaactgttgttgctacttattcttctgcggtgacttatatttactcagatgatgttgctacaactctcactgttccaaaaactactgttattaatggtgtttcaactgtcattattgaagaacaacattatttcacaactgttttacaaaccaaaacatcttacatttctggttcttcaatttttacctcctcttactacacaactgttgttacagatactcaaacacttcctgccgaagttgtggttattggtgtccctattttggaaacgaccactgtatacacaacaggtaccaggactttaactaaaacatcggtcgttactcaaacaataggtaccgatgttattgctagcagcatcataattgttcaagagcctaacttaaaatatacttatatcccttctgatgtaactggtgttaccacaaccacatctgcttatacaacaaccatcgatggaaaaccagtttttacttctcaaattgtcgttattggcccatctgttagtacaactacccaattttacaatggttactacacaactacttatatgatcactgaaacaattacagtggacggttcaacttatacttctcgtgattatgttgttggtgttcctcgtggtacatcaacaacagtttgggatctaggttcttctcatgtttacacaattactaaaacttatactaccacaggagcaactctaacatctgaaattattgtacatgctaacccatccatcagctacacttatacgacagggactggtgctgctcagcaacaacaaacatttactagaacaatcatctctggaactaacaccagcaaatatcttgaagtggctgttatttatcctactccttatactacaatcgttgaaggtacgactagcaccaactatttaaccacaagtaatggcaaaacatttgaagttgttgaaagaacaagttttcctatcactacaacatttgcaacagttagtaaagttacaacaacgttcacccctatagtcgtcaacgagtcaactgaatggttttggcaagttatatacccaaccccctctactgttgttgaagaatggactggtctttacacacgccaatcaacaaaaactttatactatcaagaaacaatggttacaggatatgaagtaatagaaaacgtcccagtctactctacatctatttcattttggacaggtactactgatagaatctttacctcctttggtgtcacgactaatcaatttggaatttcaagtacttcaacctataaaattgtatggaaaccatcagtttcagaagagacatcttcttggagacgtacttatacatcaaccagttttaggacaacatataccacaggtccagataaattcccagtcactgaaacagatgttattattattgttccaggtactgatgttgtatcttcttggagtacaagtagtatatacggagaatgtaccactgcagttacacatacttcttatgaagaaaccactattaataatacagtcacaacagttggtgttgctattattagtgggccacacccatcatgttatgccccgcctcctacaacaattagtgctactacaacaaaaaccgcaactgattgttcatctcattcaacaacaacaacggtttctacccaaggtcccgattatgcaattacagaatccattatagttatcatcgaaactccaatcaagaattgtaaaccaccagttactgaaacaaccacaactactgttccagctaccaattgtgctaaatccacttcaacaacatccaacgtcgttacagattccgcaagtcatatcacaactagtgttacaattattgtatctacgccacccacttcatgttattcttcatccaaaccatcatctatatcatcatctataccatcatctataccatcatctataccatcatctataccatcatctataccatcatctataccatcatccaaacaatcatctataccatcatctataccatcatctataccatcatctataccatcatctataccatcatctacaccatcatccaagccacctgctaagctatcaactacaccatcatcaagttcatttttcactagctcatcaaacaaaagctccacctatatctcatcctcctcatctccaacctcttcaatctcatcatctgtatcatcatcatcttcttcttcttcttcatataaccaatcatctagctcaccatctagttcactatatagttcgtcatcctctatttcatactccagctcattatctaactcatcaacaacttcatcttcaagtgcatcatacatttcaccatctgttccatcagatcatttatcttctagttcattcattaccaccgcctgaaaatcacacagcaactatagtaactactttgacatccactgaatatgctcctgcaagtgactgttctttcactaccataatttccaccacttacttaaatgaatcaccatttatcgttaccgaagtggtagttaaatctgtttttactccaattgaatcatgtggtgtatatttaactactgaatatgggacaaactgtgaaacatcaacatacacaaccaacatcggtaccgttaataatgaaggtaaatatatcaatgctacattgatagttgttgagaatcctgcattaacctgtttaccaccaacttcatcatcgtcatcatttcctattcctgtcacaaaatctaatacgtcatcatcattttcaattacaataccaaatgaaacaccatcagaaacttattcggttacaattccaagtgaaacttcatcacatccaccaattttggttactccttcaattgaaacttcatcaactccagctgagccaccacattttgcaacaacttctacttccactgcaagcacaacaactactgtttatacttgtactgaacctgagtgtcaaaaccaaccattgtcagaatcaaccactactcctcaaccacaagttacagaaacagattctcatacacaccctaatgattcaacaccaacaacacatgaaaacccagatactcctcctcaaaatacggctacaaccactgatgttccaaaagagactacgccatccaatcctgatgtttcacaacaaactactgctccacctactgaaccaactcaaactgtaccaactggtaacaccccatacaaatctacaacattaactgaagaaccatcttcatctacgttcgcaactcaaacaccagatgaaccaactgtttccatctaccaaggtgcagcatcaagaccatatttcaattcgttattctcaattttgttcatgtcagtctcatacttacttttataagttaatgataccaatattttcctgttctttaaaccgaatagattttcggatacatctaactaatttttcattccatttccgtcattcaaattatcaatgtttctatttcaaagttattaaacctttttagcaatcatcatgagatttctcatgacattttttgcatttactttattatttcattaaaattatctaggattaatttcattcctatatgtacgagtttcaatcaattcaatttttatttaatttctacaatgttcttatttaattgttattatgtaacttttaaaccaatagtttaaccgatgcttactgtttattttgatatcaatttagcaaaattcccgaaaattcggcgctttttctgaaatgaaaaaattgcaatgaaatttaatttaacacattaaaactttttataaaaaattataaacgaaagatactttacattataggacttctgataacttcatcatccatatctgaatgatgcatgaaattaataaggtcatcaatcattgaaaaatttgcatcattttgagcaaatgatctatgtttttctgatgctacatgatctgtaaaatctggatacttgactctacaattttcacaatatcctggttttggttctcttttaactttttcccttctttgttccttgaataaaccgatcgcaatactcttttcttcatttgtatgtttttgtaactgtgtattaagttgagcaagtggattatcattcaattcattttcatttatggttttcttttgcaatttgttgatattctgatcattatttttgatttcattaattttttctatgttttttagaccattaattttaaggcacccatcacttatgaaaggattatttgcggcctccacagaccgtaaagctgcaagatcatctttattgatactacttgcagttgaattttgtttttcttgatcaataagtcctattttcagggaagcataatttttctgtattatcattacatctattaacattcacaatatttttatttgattctgattcctcctttgatttcgtcgttttactcattgaaggagtcagaacaacaattcttctttgttcatttgctaatcttttactaacaacttgtgatctacttggacctaaaccattaccagatagcgcattaccacttggattcataccggatgcttgaatacctgaagcagcaatctcaccatattcacataataatttaccatcattatttggatttgagttgcataaagtagccttcataatactatcttgacgcattaatttaggcatcacagttgaatcaaatgatggttttaaaacattactatgaacccttttatgattgtgattattttctttgaaatccgtataaacgttatcagtaatacgcaaactcatcttgtcaataacgtcagatttatcagagattaaattattcaggtcctccatataattatcttcatcatcttcatccttttctatgtctaaatcattgttataatttttaaccttatttttaacatcaatatttttaatgttttgcacaatattagttttatccgtcaaaattcctttattttcaacttcattgacagttttcaagattttattgaaatcaccattaacaattttttgtctcttattttgattttgaaatggatgttcaacgattgaattctcagattcgattgggtactttatattattttcaaagagttctttgaattgatctttttccttctcttctaaggaatcgtacagctctttcaattttgtaataggatgctcattttcaggtttagtactgtaaaatgagtcttcccatgttcttttatattgaactctatcgttatattctggggtgtgaatatcttctctattgacaatatagttggaattatatgcagctactattatttcttgtctaaactggaaagtttcctccaaacattgaactcttctttgatgtcttcttagtaatgaaagagcattctgagatttagtttctgttacaaataatgatttcccattagttgtatgatgaattcttggaattgtatttttatccttccattctctgatgcatattggtcgtgtcttttcagtaatatcccatatgtacaaatattgattagcaaaatatttaaaatcgtttcttttgacatttgggtcacgatcacttggtccgaacaatttttcattcattaaaaggttatttaaattattattgatattatttaaatttgaattagcatttgcggctggatttgaattgctgctattattaagatcatcagtggtaggtacaggctctgataaatgatttaagaaacggtatactttaggatatgaccaaaccttgattgaagcttttttagctaatattgaaaataaatcaccagcaggataagttgcagttctatcaaattgacgttttgaaataacaattgtagttttatttgaataatctgtatcaattacagatccgagtcttttaaatgctagcattgttttcctctgatctttatcagtttggatcataatgttcgtaataaatataactctttgttaaaatatctctccaattttccttccatttggccaattcatcaccggtcatttttttattagcaactttacctgttgcaatttgagttttttcattagtattattttggttaggatttaccttagtcattaatagagaaggcagatatccatctttttttggtgttgatgtacccattagatgtgggaatttatcaccagaactcagtttattaatatgtggaactaattgacaagctgctctctgtggtgttggtggaggttgcatcttaagctttcgtaccagactaccatctttgccctttgaaaaattatcattgatattattagcattgttgttgttattgttgttgttgtttaaattcactccaattgcccttgcagaaggcgtgtttacatacaaccgagatgtatccttaagagcaggtctgtctgtagacatcttggatggtcttttgatgaaattcaaagaattgattaatgataaaaatgtacaaattcaaaataatatctcctttaaaatgacaagaacggggatattttcctctaagagcatttgttacacgttaagaaaaacatttttccacagctgccaacaaaaagggaaacccactcgtttttttaattgaaaatacgtaatgtgacgcgtttgttcggaaatttagaaacatgcatccaattttcggaaaattgggagtttttcattcagatttctttccatcatgaattggttgctataagagggtagtattaaatatattaatttaatcttgaagttgatattgttttaatacaaactttgtttttgtctatcaccatttactaacaactattcaactttaataactatatataatacataatgcttcaaagcttactggtgcaacctcttttagtacagattttagaaccatgccctcaacttacatctatactccctttgagtgcttcattaatatcagtatcacttcaaaaacctctactgtcatgtatatctaaggccggcgtaggagcaggataaattgttgaatagtacacttagtgaaaatggacaattattatcaaatatatttacagaggaattcaatggggaagaatatacatttaatatgaatgaacaaactcctcttttaaacaacaaagattctaataatattaatagtaataatcactataatgaccaaaataataacaaaaacagttccaagataaatgatttgaaaagagaaataagtttaattgatgaaaactataattctgattacataaatgcaaatgttaaccctgttgataatttggatattttatcactgacagttctgaaagaatggacacagagaagtacagaagataaaacaatatcaatgtggaaagtttatgagtttggaaaatacagactttatatgggtgaagtcaataaagattattcactattattatgtgcaaagaaggattatccttcagctattgcaattgcaagattaacaagaatgtgtgaaattctttccaaaagattatagacctgcttttatttgtattctataaaaagtataaatatcatatatggtatacatgtctacaattcgttctcttctataaaaaaactacagagtacagtgactaatgaagtaaatactataaatttgaaaacatcttggcatgcactataataagacgaaataattaattgttttgcaaattctggtgctttgttaaatgcataagttgtatctaacaatgctttttcaatcatcttttgaataacgtcttcattctttccaatatctttgaaattactcactaagttctttcttaaggatgattgcaatatagcacttgcaactgaaacacctaatgttgaacctgttgatctaaacccatattgtattgaagtaaccagcccatgttcagaatgattcactgaagatatcatagcaattaatataatggtgataattgatgtcattccgaattgacctggaattagtatcaatgaattagcgtaaaatgacttttccttatctgaagataaaaatatcaggaaacttcctatactgttaacaaatgtagaaatgagcaataattttttgtattttttatattctttaatgtacaaacctgcacctatagatccaataattgcaaaagtggagcctgggatcaatctcacacctgattcataacttgataaattaagaacagactcccaaaaaaatggaacataaagcaagatacagtaagtattcatagataaaacccaacatccaagtgagctccaaaaaatagtcttattttttaaaagcttgacaggtataacagggtttgaaattcctttttcaaagtaataaaaatgtatcaaaccgatcaaaccagctccaacaataacaataaactgtatactttggaatggaatattctttccaccaattgatgctgcaaacattaaaataaaaattgaagaaactaaaactgttgatccataaaaatcaactttcccaaccttagatttgagactttcttcaacagtttcagcttcctcttccttttcaacattcaaatataagaaagttaaaataccagagattaaacatattggtacttgaacgataaaagccaatctccaattaaaatatttttgaaaaaatcctgcaaagacaccacccatggcacttccaattccaaaaaagatattcacatatccctgatacaatccacgttgatttaatggaacaagatcagataaaacaattgcactcatggtattgaatcctccaccaccaataccacttatagcacgccctataacaagaacaatgaatgaatttccaataccacataataaacatcctaatgaaaatataactgaacaaaaaacacatacactttttctaccaaaaatatcagagaatttaccgaaaaaccggttgaaaagctgcacataataaaagatacgatgttgcaatccatgaaataacaggtaaacattgtaagtcatcagctataacgggtaacaaagtagctacaattgtagaatctaatgctgcaacaaaaacattaataaacatacaacataaaataatatagaatctcatgtctttcttaactggttctttagcattcctgaaatgagaagtgacatcattccattcttctgagtttcctgtataatcagctggcgatatagacgtatatagaggggtatcctcaaatatttgttctgtagtcatctattaatcaagttaccagaaaaaaagactgatctttataaaatatatatggtgttttatcactttaaaatcttaacttactttattacttcaacggttatcgacgagtttttgacattttctcttatcagtttcaaaaaaatatttttcaaatgcgaattctggagaagcttagaccggcatttaatttccggaatttttgtttgttgagcgcaaacaatctccgagataagtctgttatgatagacatctcccggataacatctccgagaattaaagtttgctaatttatttcctggtataaaagatttatctttccgttgtcatttttcctttcaagcttatctagtatactcagccaaccaagtaatatgactgttggtaacgttgattcaaaaaaattctgggaaattgcagattctaagctcggtttcttcggtgcacaatttattagagaaatcattgtgaaatcagaaggtgtatatgtctacactaatgaaggtaaaaagattttggattttacatcaggtcaaatgtcttgtttagttggtcattgtcaccctgaaatcaataaagtcattgcagaaacctcttcaactttagatcatacactttcaggtatggttagtccacctgttattgaattagcagaaaaattaaccagtttattaccagatggattagatagagcaacatttttaagcactggtggtgaatctaatgaatatgcaattaaattagctaaatgtgtcacaggtaaatttgaagttgtcggtttatcactttcatggcatggtatgactgcagctgcgaatgcatgtacctatcaagctggcagaactggtcatggaccaatgacaccaggatctttagttttaccaagtccaaatgcttatagatcaatttttagacatgctgatggctcatatgactggaaaactgagcttgattatggttggtcgttaatagatgctcaaagtacaggttcattagctgctgtcattattgaaccagttttatcttctggtggtatgcttatattacctgatggttatttgaaagcaatgaaagaacattgtcaaaagagaggtatgcttttaattgttgatgaagctcaaactggtgttggtagatgtggtagtatgttcgcatttgaaacaatggatgttgttccggatattttatgtttaagtaaaactttaggtaatggtttaccactttcagctgttgtcactagtaaagaaattgatgataagggaagagaaggtggattccttttctatactacacatgtcaatgacccaattccagcagcagttggttcaaaggttttagaaatcgttgttcgtgataatttagttgctaattcaaaggctagaggtgaacagtttgtagctggtcttaaagaactttcaaactctttcaaagcaattggtgatatccgtcaaatgggtttgatgatcggtttagaaattgttactgacagagaatcaaagacaagtgatcctgaaaaagctaatttgttagcaaaatctatgatgaaaaatggtttaaatgctaatcttattgctgtcaaagctttcggtggtgttttcagaatggcgcctccaatttctattactgaatcggaaatcaatgaagctttagtaattattaaaaaagccttcgaggaagtttatttttaaattttatattatatttgtcttttttatttataaaatcaataacaatttcgtattcttactctattttaattaatcagatatactcataatctaaggcatattgttatctactaattgagtttccggtggaaaagttttgaaatgtattgtgcttacgtaattgtttatttaatatcctggaaaattatcttatcattccaatcatattttggggtcaaattattgcgcctacaatgtaacttttcaattaaaagattatcactatgttaatttcacaaacggtttattagatgacaaaaacgacacaaactgttgacaaaatttcaaaaaaaagaaaacgtggtttagcatgtaaaaattgcagaaaaaggaaagtcaaatgtaatattaatgaaaaatatccatgtacatcttgtttaagttcaaatcaggaatgtattgagtcaacgatcgataagcggaaagaaagagctgaatcagagtatacacagcatcttgaaaatagattaagcgtttatcaggaagaaaatgccagaattgcatcacaattagaaaatattgttaaggttatgagagaagtgatggatgttagtagttcttttgagtttaataaattgaaaaatgaaactacaaatacaggaattagctctcaacaaactaattatattaataactacactaatattcaatatatccaggatgacattgagccaaatttagaagaagatgtagagtctagtgaaaatttgaatgaaaaatatccaaccccatccacatttaaagcgtttgacaataaacctttatctgtttatggagcaacaagtgtttttgataatatatctgtctcaaagctgaaaaatcttaaagaaatggaagagatttatattttgaatagagatcctaaaattaatttttacatcaaattgttctttcaatggcaatatcctgatatacatatctttgttttcagagaggcatttttattagattttttacatgctaagaacaacagctcttattgttcaacggaattaattttttccatttgtgcatttggttgtttgttatcagaagatgaagataaaaagcagatatcaaataacttttacgaaaaagcaaaacaactctgttttaataattattctaaaccttcaatttcactcttacaaagttttttattgcttggattatatgatatttataatggtaaaaatgatagtggttggatattgagtgggatgggtatgagaatgggttattctataggattacaactcaattccagagaagatactgataatttaaaatcagaattaggtacaaagattaggagtcgtatattttgggggacatatttagtggatcatttaattggtttattattaggaagaccaccttccttgaaaatgaatgacagcactattgaagaaacgattgaactaccagatattgattggattcatgaatatacatgccccggtgagctaggtgaagctactaaaattttattaattggaaacccactttgtgaaatggttaaattaatgaatatttcaggtgatatgataaatgatatttttgatgaacaaaaatatagcaagcaaaatgacagtgtgatattttataggagattaccattggttcggaagtacaatttgagtatgtttaagtggagaaagacattaccagaatcacttctctggaatagttcagatttgaaggaaattggtgctgatccaaccactttaacttttaagttgatatactacatagtcatactttgtttgaatagaccatttttaaattcaagagttaatgaacagtacgtcgagtattgtgcaaattgcagaaagatttgcttaaatgctgttaatgatcttactattgcattgagtagatttaccacaatatacggtttcgataaatgttcaaacttgatcatatacagttgtatcatttcaatttcagttatgttgagatcatacagctcagacagtaaaacaaatttgatgagtgaccctgaagtgaaatttaaaatattacttttcatgaaaattcttagagagtgctcaagaaactggggtttaagtgaaaaggctttcaaattaaccaaagataaattacgtaaggaacataatatcaacattgaagaggaattgaacagttttaatcaaaatgaacaacctgatttatttacaagtgactatactgaagagttcataatcagtggccatgaatcagtagacggtgaaaaggattatagttgttcacctttagataaggaacaaatgctccaaagcaaggattcgttaggtggacccccaattttcatgttatctaacacatttagtcttctagatgagttcctatctgatgacatgatcgacccttttgattttgaagtttgaatcattaaatcaccatacgttttcaagggagataaaagtttcggataatgtccccgatatttattatcacgatagtaaaacttatcggagaaccaccccgttttattattgtgcgcgtacggagaaaaaatccgaaaatttagataacaatttaaagtttcaacgtttaaatatttttattttgataactctaagtttttttcataaagataagaaagttattgtacaagaacaaaaatctccgatatattttgtgattgtataaatacatcagttggatccaataaatcacagcatcatttaatttcaacttgtgtaaatttttttaaatttataattatcaacaaacatgtcatcaatcaacacggatgaaaaagtcaatgtaaaaacaaatgttgaagaatttgatggagaaattcttttaggtactgtcatttcagcttctggtgaagaaacagaagttcatggtgatttaaagcatatggatgaagctttaggatttgcacttcaaaatgatgatttccaatatactgaagaagaagatcgtaaagttttacgtaaacttgacttctacttgattccatttatttctttcctttactctttattctacattgataaggccagtaatggttttgccgcagttatgggtatcagaacagatatgaatatgaaaggtgatcaatatagttggaccacttccgctttctaccttggttacttagcattccaaccaattgcatcattatctttacaaaaatttccactatcaagtacattttcggtttatatgttttcatgggcagttattatttgcttgcaagctacaaattctaattatccagctttcgtcttcttaagaacacttttaggttgttctgaagcttctgcgtctgttttcactacactattaacatctcaatatttcaaaaagaaggaagcatttttaagagtttcattttggcttgccacagctggttttggtgttttctttggtaatatgatggcttatggtattgcaataagatctgatcaattttcaattgaatcatggaaaattttattcattgttgttggtttaatttcatttgtcacagctattattttatattttcatgtttcaaatactccttctcaagcatggtttttaaatgaaagagaaagaagaattgttgttgaaagaattagagaaaattaccaaggatttggtaacaaagtttggaagaaacatcaatttattgaagctatgactgatataagaacttacttattttttatttatgcagtttcatttaatattccaaactctgcattatcttcatttggttcaattttactaaacagtgatttaggttactcttctaccgatgcattactttatggttctccacaaggtgtagttgaatttattggtttaccggttcttgcttattctattcaaagatttaacctaccaagattgttaacatctgcaatattgattacaatttgtatttgctttgcttgtttacttgcatttggtaaagactcacatactaaactcgctggttattatttgctaggtttaatgcaagttggtccaattggtagtttctcatattttgcttcaaacgttccaggttatactaaaaaagttactattacttcagtttatttagttggttactgtgttggttctttagtcggtccacaaacattccgtgcaaatgatgcaccacattacaaccctgcaaagattagtatcgtggcttgtcttgctgtttctgctgcttgttactacgttctttgggcaatttgttattacgataataaaaagagagatgctaagcaagcagaattgggtgataaatatgttgcaccaaaaaatattgaatttagtgatttgacatccaaagaaaatatttatttcagattcactttataatctttttataatctttttataatctttttatcatttattttttaatcttttagttttattaatattattaccatatgccaagaatagccttcaagataaacattttgtatttgttaagactcgaagctctttttgtcattggtgcttggaggatagttagagtgactgataaatttgtcaatttcatctttattagtaggtgaaatgggctcggttaaagaaatccgaaaaacaagttaaatcggagttcaaaatccgcaaaaaattcccacttatcagcaaagttttcaaaatattcaacttacttaagttggagttttccacttctaactcttttccttaaatttcattgaattttaattatcataaaaatattcaaatatcgttgaaatgaaaattagcacgttagctatatactttttttgttttgttctacaaggcatttttgcgctaggcttgtggggaattgaagatgttaccttagtaccaaattttgtcccttcaattgaatcagtgatttcacaaactgacaacactccagagagatggaatgtggttgaattacttaaagtcatggcaaaaattgaatcaccagttgggtatgaatataatgtaatgaattggttagcaaaaatattaagagaacaggggttaactgttgaaatgcaacttgttgaagacagtcaaaccagtaataccggtgaagatagatataatgtttatgcatatatgggaacagaaagggataccaaaattgttgtttcatcacatattgacactaatcctgaaggtcatattccatataaggagattggagaagagattcatgttagaggagcatgtgatgctaaaggtgcagcagctggacaaattgttgcattttttgaattatgggattctggtaagattaaagaaggtgatgtttctttattgtttgttattggtgaagaatataatggtattggtatggaagttgcagttaaatcattaaatgctacatggagtaaagctgcgattcttggtgaaccaactgaaaacaaattaagtagaggtcataaaggtaattttaggtttgatgttgaagcatggggtaagaaaagtcattcaggttatccagagttaggttttagtgccattgaatttttagttaggaagctgtatactcttttggaagaagaaatgccatattctgatttactagggccaacaactgttaatattggaactatccaaggtggtgatgcggcaaatattgttccagatcatgttaaatccgaactttatattcgtatggcagcagaacctgaatggatcaaacaatatgctgaagaattgtttaatactgaacattctaaacttagtgttgttcaatatcttgcaccacaatatctagactttgatgttccagatattgaactaatttcatgtgcttatgctactgatatgccatatttggaatttttaggaataaaaagatatctttatggaccaggtagtatttctgttgcacatacacaagaagaattcgttactgaaactgacttatatcaatcagttattgattataaaaaaatcatcgagtataatatttagattttatttataaattataaaaaggaatcctaaaaagaaacaaaaaacaaggaagctaccaaaccaacggagtaaaattttatttttctaatgtccgatatatcaaatatgagaaataaaaatagttaaaaatttgttcaaaagtaactgttttagtgttgtcatgatataatgtgtgtagtggtgaactttctataaaaaaattgggaaattggacatcagataaaatggataataatgtgtacatagtatcgtactgtttagatagagcaaaataatataattatgaaaatttaaaattatagctcactgtcatcttcaaaatcatcttcttcatcaataccatcatcaacatcatcttcatcatcatcgtcatcatcatcataaaaatcatcttcccaccatccttcattttcttcaatattttcatcttttgtaggtttaagagactttgtaacatcgtctaaagttggtaacgttatatcagctggcatacgttccctactttttttcacgtcacttttaactttctctacataaacatccctttgctttttataacaaacacttgcctccacatttgccggactactaatatttggatcatctaaaagacttagtatacttaataaaacagattcaacattttgagcaggtgaccaagtaatatttaatggctcatcagttggttgttcattatcggcagtatgaaggatggaaatacataatcttccgtcactataaacatttggatgaaaaatagcaggagtaaatttaaatgaaggtggagtatatgggtaatttggtttaaattgtagttgagcagataaatatgcaccattatagatactttcaggatcaacgaccatcagagatacattccataagaagatgttttcatcggggatttctacatgcacttgttttaaaccagttttaggattagttatatctctaaactctttccaaaggatttttgctgcagacattagttgttttgttgtgtcagattaaataaatagaagattaagtgttgatattttgaggaggaaaagaggatctttgaaagtatcagattcgagttgcggaaaaaaagaaataataaaactatatacgaatgaataactgtggtagaatcgatatttatcactatacactttgttacgtaagaatgttataggttacattacagctggatgtagggatattacaagttgttatgatatataagtgaaagtaggtagaccataacatcgtataacaaatcattaatatcaatagtttttgaaactttcattataaactttataaagtgaagtctatcaatcagcaattatacatattatttacaagaactggatacatggtatatttatatatcattcttcagtagtaagaacagcctctatagcttcttgtttgttattttcaaatttttccttatcttcatcatctttttctttatcttcttcttatcttcttctttcttcttatcctctggggttatacctaattgacgtgcacgttcttctaatctcaaacgtttatcaatcttagcttgtcttattcttgccaattcagcttgaatttcatgtggttctttaggaatcttattaagagtatcaggatcaggccaataacctggaacattaaattttcgatcagtatcaataccaacataatacatgatagtaattggagtcattaaatagaaagtgaattttgctaattcaaattgtgaacgagtaagtttcggtagacgtttccagaacatgttttgttgttgtgtgtaagtgaatgcgtgtgttctttatcagagaaaacaaataagaataaaccatccttaggagctactaaagacatcaatcatgcactgcttgaaaagaaaccctcttgaaaaagagagaaatttcaggcggcgcggctgcccagtaggttgtgggaaaaaaaaaatatttttctttttttcactgcaggaattattgattagcaaaaagttgattattagtggttggtgaagttgtcaatggaaggaatgtttgtctgtttgtttgaatagttatttaaatagaaatatttactgaaacaaagatgtctaaagttttgcaaatctgtacacattccggctcttttcatgctgatgaagctttggctgtctatcttttaagacttttaccacaatatcgttatgctaatttagtacgttcaagaaatccagctgattgggaagcttcagatgtcgttgttgatgtcagtggtaaatatgacggtgtcaaatattttgatcaccatcaaagagaattctctgattgttttaatgaaaaataccatactaaattatcatctgctggtttagtttataaacatttcggtcgtgaaattatttcaactgttatttcacttaatgaaaatgttgaagctgaaaaaaataagattgattatttatttgataaaatttactctgattttattgaagctgttgatgcaaatgataatggtattgatatgtatgaaaataaagattcattaactccacgttttagagatcgtaatttcacaattgcaggtattgtttcaaatttaaatccaagttgggaaactgatgcaactgatcatgattttgatagacaatttgaaattgcatctaaaattattggtgatgcattctttaattatcttacatatataggtaattcattcttaaaggctaaacaatatgttgttgatgcttttactactagatttgaagtcgatccatcaggtaaaatcttattattcgatagatttgttccatggaaggaacatttatttaatgttgaaaaggaaaataatgcagttggtgaaccattatatgtgcttttccctgatagtgctggtacatggagaattgcagctgttccactttcatctactagttttgattcacgtaaaaaacttccagaagcatggagaggtcttcgtgatgatgtattaagtaaggaaactggtgttgaaggttgtgttttcattcatgctgcaggtttcattggtggtgctaaaactaaagatgcagttattgcacttgctaaaatggcattataaataatataataaccatttcaataaactaaatagaatgtttactatttatcatatctaatacatgtatcgtatatctattgtattttgtatgttatccatcaacatataaccatcaacataagtaatatatgtccgacagtaactttgaagctttaccggcaagtctcgcatttataggacaatagtggggggctcattggggggttgagaagtgttgagatttttatcaatttatttgtcccttattttattttggctatattgtgaacgttgagtttttgtttaccagatttcggtgaatcctttttcagttgtttagaaaagaaaggagaatctaattgaactctctgcttaaccaaactagtatctttatttgtcatgaagaaatttatgaagcttagggataaagacaagaataaacacaaggatgatcgtctatccagtggacgtaaacatcatgcccttagtattacagctcaggaacaagttcatcaagctcaattggcgcgtgcacaacagcaacagcagcaacaacaacagcaacaacaacagcaacaacaacaacaacaaggtagtaccacacctacaacaaggataaaacatcgtgcttcaactaatagtttacatacacctacacaatcaacatttgaaatcaataaatctccactatccgttaatttttctgaaacttcatcacaaaattttgacaatttaacaggaattgaatcttcccataatgatattattaatttgaaaatgttaccatctccaaaactttttagtaatcccacttttaatgaaggtaaaagtactttatcggcatcttcatccattcatgaatctatgtccgttttcccgacaactggcaatcatttccatcaaatagaaaatgattttgaatctgagtatttggattataatcaagattccacgtttgttaatttaaccaataatgatagtcttaatgatattactgccggtgatagtttattgcaaacaaaacaagatgcagtgcaacatgatgttgaaattgaaaatgaaatagttactgaaaatttgatttcaaattcagttagagaagaagcagaaaatgttgtagctgcaaaaagtcgtaggaattcccaaatttcaacattttcaacttcaacgcatatttcaaacatacaggaaactaataaaaagttaacacaatcattgaaacattatccatccactatttcattgtcatcctcttgtcatccacataatcacgcgcgtggtaataacattaaacataatcctgcatctcttcaatcattagtaaaatctgattgggatgattcaacttttaaaactgcctgggtcaatagaatatctgaaaattatgatcctcgtttatattggattgaactaaaaggctcatcattattagttcataaagttccactgatttacaatttgctaaaagtttaattgttgatgaagaaaaatatgaagatcaatctttcgtttcaatttcagataaaacaatgacttcatacttacataataataatgctgataaaagcacgactgatttatcaattaatactaaagctgatgatagttttgattcaatttcaacaccaattcctactccaacaaaattaactttttcacatctgcaaaatgaaaattctattacttcagaagacatacaaagtataactacagaaaacaataaattgggcgatgttgatgaatcttcaaatttagatgaggacttccttcattcaagtgatgagacaagaaaagatgatactgcaattgaacataccattaattttgcagatttaattcaagattacgaatcttctaggaacatttgtaaagaaatcaaggatttaaattgccgaaatatcaaagaatcgcctcaatttggggacagctttttgaacactggcaagaaagtacctttcattattcatgaattatcgtacgaatctccatcatgtccacatccaaaactggtacttgatcctagtacattatctatattaagaggttctttggaatctttatgtcataccattatattttttccatctgataagacatctgatgaattgattgaaatactaccacttctttcgagtttaattgattcattcgtgtattttcaaaagtattttgatcttttcacgaataaaaattatctcaccatgaaaaaaattaggataactgatatggaaatgaaaatgttattttcaagattgagaagagttattgaattatcaatagttaaatttaagggtagtcttttagatgatgaaatattcaaattaattaaaaatctcacaaaatctttaataggtaattgtaacgataacttaaacgtcgaagaattgaaatgcattttgaatgaacttgatcaagtcagattatctttaataaatttagtcagttaccaattagatgcaagcaaatccaatattaattcacttcttttattggatattaataaatctgaattaatctcagctaaagattttattatgttaccaactaatgtattagctcatgaaatacattcaatagacttaacatttatgaaaaactggccattaagatcagattattcaacaatattatcacgtttagaaactattggttcatcttataactattggaaattcaatccattgcagtttgtacctgcggtaaatacacattatttaggtaggttattagcatatcatatttttgaaggatccagaaacatcaattagtccagaaaaacgttcacaaatattaatgaaatggatacatttaggaattgtattgagtgatcgaggtgatatggtttcatggttaggaattgctacagttatttgttctcagcctgttttaagattaagagaaacatggagtcatattgatcttaattatttgcaaataataaggaaaaaatgggcttctgttgtttttgaggtacgcaaagctgagatatttggtactcaatattttgatataaaatcaaagcataattttaatgaaaatgaagtcacaattgcaggtaatgatataatggaaacttttgaaacagaatctggtgaacaggatattaaagttatagtaaccaataaaattggtgaacgttattcaaagaaagatgcagttccttactatggtgaattatttacagttaatatggataaaatcaaagattacgcacgtcagtatactggatttgaaacatttgatgatattgaatctgatgactacatgaaaacaaactttgttaaagaatacatttcttatatggactcattaaaatggaactttaatcaatgggacgtttattataataatattgttgatgggagtggtgttaaatctgaattttctggaaacaaaaatgatgagggcattgaagaggaaaaagaagatagtaaatcatctgtgttgaaaatattacaaactgcaatagcatttaattcaaataatggaccatttccaatcaatcattttatgagtatgtcggttgttgttgagcctcctcatagtagtattttggcaaacagtgatggtagttttagaagtcctttatttttaggttcatatgcatcaatattattcccccgattactatcacaatatgaaacttatgatcatgatgaattgttaggtgctcttggagggactgatttaatttccgaggaatcctcaaataaaaggcttaagaaaagaaatgtctatctgaaaaatattagagatatgtttgtgaataatagcaatggtgatgaatttaaaactgtggacaataccttattttttgaatctttgaatgcaattccgggaacatctgataaaaagaggaataaattatcttcaaaactattatttgaagatcctttgataccaaattcaaggcatctgagcacagtttctactggaagtttcaatcttgatgattacattgatatttataaatcataccttggagaattggttgaaatcttaggctcagagtctaaaattaacgaatctgaactaattcgttattttcacgaagatggtgctaataatgtttctattgtaccttctgctgctacaactgatagattggttgatattttggttttatcgggatccatttttgggatgtgtttgaatgaacaagatattaaatcgtattgtgctaaaaataatattgacgaagaaaacttgtcattcaagttatatgactcaagtttttcatatacatttttctcaacatatagagtgttttttactacgaaacaattagttgaagctttacgtaaaagatttgatggtgctaaaagtgcagctttatccattcaggaatttgtcaaaagaggtagaagagcagtaattgatgatatttttccaaaatgggatggtaaaggtttagatgaccccgaaatttggaaaaccattaattggaaattggttttgcaaattcaattaggtgttttggaagctgtttctgtgctagttgataaacatttcaagcatttcatcgatgatttagaaaccaagcataccctttatacatttttagaactacttgattgtacaatgttgaatgagtggccgaaagttttaaaatttttaaaaaatagtatacaatctgatgaatataatgttatacttgatgagtacaaattaattcaaaataattacagacatgtaagaaatatttgtattagaaagtcatatactccagaatgcgaacccgctgaattaagcttctcaaatgaactgaaatctattcctgatgaaaactgtttgccaacagttgatgacattaatcaaattgatcaatatgttacacaattgaatgaaacaattgaatcatccatgaaggcaattagatacgaagactggttagaaacgtttgaagtgtttcaatctttagttaatagttccccattagcaatgtttaattacaattatcaatcatctacaactcactatgatttaattaaaattggtgatatttttcaatggttgacgactgtaaaatctggtgataaatgtgacaaggatgtgtatttacttgataagttgccacctactgttagatcaatttttaaattatattcaagattacaaaatattatcttagctgaattagttgatgtatctcttactcttgatgagaggattgggaaaatgggtgctgctttaagaattattcaaatttgcagattaagaatgaaaaatgttaaattgtctaatcatgaaaacaatgctgatattccaagttatattgaatctatttttgtgaatacaattttattgccacagtcgagatttttctcatttgcttggcaatctgctgtggaagttattagtgatggtaaatatgatataaaaatgtttgatcaattggacactatattgtcattattgaacgtaccagatgagtttgaaatattagaaaatgtctcattatctatttgtcctggttgggttgcaaaaagattgttggaagttgcatgttttattccaagtatggatataaacaatacaaagctggtaaattttgaaaagagtagatgtatccataactgtatcatgaagattgttgaattacaaaagcaaacgattttatccaaaatatccccatatttgtcaacgttttcatttatttttgaatatcaaggtaagatcccatcattaaaagaaagttatgaattatcattaaaggaaaaaagtgaaaacggtttaaatactgtatcaatttttggcaaacacatagaagatcagatcaagttgattaagttggaacagagtaaacgtgatttgctattaagacaacatgggcaaacaccaatgaattctgttaatagatcaagtatgtattctaaggatcacattaatcgtgatgaaagttcaagtatttttaccaacactacctctagttttactgatattaaatcactgatggatgatactgctgataactctatttatgacatgagcactttatcaactgcccttgattcgtcaatagctgatccaaatcaatcagtacaaagtattaaatctacgaaatcttctagaactccaacaagtgtgaattcacaaccattatcttcaaatactaaactaacaacagcttcacgttctcgtggatcttcttctaaaagttctgtcatgagtcacggtcctaataaatttaaatttccatttttcaaatcaagaccattttcattgaatataaatacatttaatcaaccaaatgttgaaaaaagaagtgttaaaataagtgagttaccagattccaactccatgatttctaaaagtaaaccttatgtaagtttacatttgaaagatgctacaattttcccaacttatcgtacaccttatagtttcacaattgatattgggggtcaaaatcatgaacacacattccaagtagtaaactctgatgaagtaagtgaatggttatacaagttaacatattgtaagaaacattggttcttttcaaaatccgttaacaagcctacgttgaaaaatgcaagtaaaatgacatttggagttccattatcatttatttgtaaaagagattcatcacctgttccaattattattgaaaaaattcttactgaaattgaattacgtggattagaagaacctggtatatatagaaagagtgcatcattaactacgattcaacaaattaaatctgaaattgataaaactggagattttaacatggaaaatacattagtatttaatattcataacttaactggttgtattaagacatacctaagagaactacctgatccaattattccagatatgttcattgatgaattatcaaaagtttctgagattgcacaatctgatgcaagatttgaattatacaagagagttttgagtaacatgcctattttgaatcaaaatttgattgaaagattatcaaggcatatgaaattgattgaagaattcaaggcacataacagaatgactagttataatttagcaactattatgggtggttctttcgtagaaggatgtaaacctgacactatgaaaaaatcttttggtatgattaattttatttgtgaagattggattttacactatgatagagttttccagtgatttaatctttcactcttttgctggattttacttttattttatagaattatttagatattaaattgtatacattcgttttttattacgaatcatgaacatgattacataatacagattttgaagtcgcagataaccgaagatcaaccagttacagttgttgaatagataaaaagtttttaaagttaaagttcagtttattaatttcatccctctacaaggaaaaatggtcaagattttagacgttgatacaagtaaactagcaaaacatgttgaatgtcagcgtgggtatgaaggatatgaaaaatatggagttgcaatgaatgttgatcatttaagaaactccgttaatattgatgacgcaaatcaaggttcagcaattaagttaaagcaagttgcaccatgtattaatgaatatagcaaggcaccatctggtcacaaagcaactactaattggaatattttcagatcttcggtaattgaatcaaaatggacaaatagtgaagatggaaagggtaaattttataatttaacagttttggagaaacatccatattctacacagacatttgttccaatgggtcgtttaagtgatgaggatgcatatattgttaatgttgcacctgataaggatggacaaccagattatgaaaaagttgaatcatatgttttcaagggtaatacagctgttacatataatgttaatacatggcatagtccaatggttgttttgggtaaaactacagatttttgtgttgtcacaaatgaaaatgatgtcgatgaagaaaactgtgttgaagtattttataatccaggaatcaaaattcatgttagaggattgtaaagtttggtatgtttttttaataatttttttccaattttttatttaatactatagattacacgtcaaaaatatactaatactaggataatatatatgataataatatatttatgtaaattatgcatcaacgtccattgcagctgaagtactttctgaagcttctgtaggttgatcattttgttcatcatcttcgtcatcatcttcgtcatcattatcagcacctgtacttctattatttgataaagtatctaataaagataaccattgctctacttcttcatcatcatatactgtaaatgcatcatctttgccaacaactgccactgttgtatttgcagaagttaactctttatcttgagctaaagtatctcttaaagctgtaagagcatattcaattaattgttcctttgaagcatctgggaattcttcaaatttacgttcaaagaaagttttagcagcttgagatctagcgccaattgcagttgcaacatattctaaagctgaacctgaaggtaaaaattcgaaaagatgaggacctgattcatcaaaacctgcaattaataaaccaacaccgtaaggtctaccaccagcggattgagtatttgtttgagccttatcagcaattgagttgactgccttttgaatattaaggggtctattgaaaaccatttgagatgacattgcttgttgacgtaaataatttgataaaattctagcatcaggagctaaacctgcaagagcaacacccatatgattatcaacacggataattttcttttgataagaacctaattcttctgcatttctcttgagagctgccaacacaacatgattcttacttacaagtccaacagcagctgaaccttgtttaattgcctccacagcatattcaatttgaaatatacgaccagttggagaaaatgtagtagcgtcgttatcgtagttatttctaaacattaattaatactgtgttgtcttctgaatatatcgtttaccaattaagatcaatctattcttctgagggcaaaccttcaatctgcacaattcagtttccttcttgtgaaagtgaaataattatcaaaattgcgagaagtcgttaaatttgcgagaagaaaaaaaaagttccttaaattcccgaggtgtttacgtaatcccctagtaaaatgaaatggcatcaatttaacatcattactagtagtattaaatttatgaaacatggctctatctcaattttgataaaacaatttgaggctgtctcctgtaaagatagttctattatatatacatatagtatacaatcatatacatcaatggcactgcgttttagtccacttacacgaatcatagcacttagtggccttcttgcactgggattccttctagtggcattggccactgctctatattcatcttggttaccaatttttgatgcattaatatttgccgttgctcatattccagttttacttacgcaatcttatgattcatcatcacttgatttagattcatttgatggtacttttaatgattcacctgcatcagatttgggtaaatggatatcaagtttcctattaacagctgctgttgtatggccaattacactttcacgtaatgcaattctatcatctacagcttcaacgataactattgttggtggtatactaattcatactacaattgtattatttacaacatttttcaacactttaacggataatgatgatcctttctctatgtaacattttttatatttcatattttcaataaaaataaaaatacagtaataaatctcttatcgataaatatgtagtaatttttcatgataactgttgagatatatggttatgagattaagtaatcataaacatttcgtcgaagattttatcgacgacaaataaatttatctatcttgaaatatgaaacatatttggaatgtataacttagttactcttgttcttcttagaagaatactcaagcttatatataatatttatatattaaaacgctaactaaagatctacgtaatctattaactatcatcaaagatgtcattcaatcaagtcaactattccagtaagaatatagataaaaccgctgagatgatatctcaaatggttatctcaggtgaacttaaatcggacggtaccaaaggtaacgttactgatatcgtaaagaaagttatggcatccaatttaaggaacgaaggtattaataacagatatggttctcaccaaattcagtcaaaagagaacctcactgccctcgcatccgaataataaccggtatttctcgaaattacatatcagatttcagtattaattcaaattaatttttttcttgatttttattcttgtttttttgaattggtaattggcaatgtctaagaagaaggtgattataaatgataaatcatttgttggtttaggtaaaacgttcaaaatcaggttgtttaacttgtcggaagagaaagaaaaaatgtgatgaagttcatccaatttgcggattatgcaaacaacgtaattctgaatgcatttggagagatgtaactataaataacaagaatcaacgttttgattttaattcaatggttgaatcacaaaaattgataaaatcacaatcgaaaaagcaaattatatatgaaaattcctcatcgattaaaaaaccacaacatagtaacaaaattaagcaagttccccagaattctacatcccagaatactgaattatacaatttaacaaaagattggagcaaatgtcaacacgaactattttctcctaaaaactatttaaatagtcctgattttagtcgtgcagttgacgagcttatgggtaacgattcaatgtttgaaggtttcattgataatattgtcgatcatatacaatcacctcaatttaatccagattttagtttattagactcttcaattcaatcaagtttagcatatgcaactgatcttgttaataaaacccggcgaaattcaacccaagatattgattctaacagtaaagataatattaatcaacctccattttcacctttaaggcattttatgaattttaatgaaatagagaataatacacctgatgagaataatggtttacaaaataatggtaaaatcattgaaattaataaatctacggaatcaactgaaataagtctcaaaaaagagatttttgataataataataacaatggtgtgaatccaaaagataacgaggaagatgaatctgatgatgatgatttggaaaatgataaatatccaccaatggatgaatctcaaatacttgaaaatgcctatgtttcagatgctgaacttataaaaatatttaaatccaaaaaattccattcataccttaagcctacagttcatttactattaaacaaaaataattcactaaatatcataaatccatcatcaactattatgagacagttggatggtactgggaaattatttcttgaacattatgttacaaatttagcaatgaatcaattagatataggtaataaacaattctttcttgattatgcattaagtgttgcatcaactgataaagccatattatattgtttagtagcttggggtgggatgtttttagttggtagaaataatgaagatgctaataaatattttgaaaatagttataagctgatacagaatcgtcgaaactcaaataaaatagaagatatcactgatgatgatagtaacaaaagcaactcctaaaagattttcaataacacagaatgattacaacaattctttttcaaaaaatgacgtttccacaaacttaattctacgaacgaagaagttatcaaatgatgaaaatattaaatgtttattattttacatattattactatgtgctgaaatatcaactggtgatgtatcaagatggtatcaaatgttattacaatgtaaagatatacttgacaattatggtagtttaggggagtttattaaaattaatcaaaatagtaaagttgccaaatggattatcagcaatattttctatcatgatgttttatcaactaaaacattagattatggtacattattctcatttgatgaatatacatatgttttccaaacacaaaagatttttgaaaatggtgattatggattggatccattttatggattatcgcaggatttatatttattattagcaaatgttgcaaatcatagaaagactatcaaaaatatgaaattcccattaagttttattccaacaagtggactatcaagtgtaccagatgaaaaatattctaaagagactattaaatcatggtttgaaatttttgatagtcaaatattgaattgtaaaccacctaaaaaaatgtttgagttgttattaaatttggattcaacggggaaattacttgagtatcatttaacttggtttgaactaacacaaatatgtcttagaatttatattagaataaatttcaaagagatggaatttgataatgtggaaatccaaaacttgagaagtaaagcagttaaacttttcaatatattaattggtactaaattacaaacattattaggattatcattgttaatgattggtgttacttcagttacagttcaagatcgagtcagattaaaatcaatttatgaaaaattcttatgtacttttcaaattgttaatgttcaagtttgctgggaaattattcaacaggtctggaataaatatgataatgaagtttattatggaaaagaacattatgttgattggcctgaagtggttaatgcaatgggctggtactgttgctttacttaattaatccaattttttcactttattttttattgtgtatatacaacgttatatatattatgatcgatttaatatattcttcttaactcattcttgagcaccacctttatacatttcctttgttcctctcattaactcatgaagttgaataatttgatcatctgacattttttcaagcatatcatcctcaagatgatatttcttccaatcttgttcagtattttgtaaaaccatttcaagatatttttgccatgaacttaaaaatccaataatttgtaatggattatcaattttttgatgagctctaaattcagctttgacatacatatcacccagactacgttgatcaaatggtaatttacggtgagctcttaaaatttctctgtataatgatagtggtggtaataatggattttttactttttttggttccttcatggtaaccttgaatgggagtttagatgcattattccttaaacattgtattattctcatgacttgagttttccgttatctatataagagagccttgtagagatcttgattagaaattgagacaagttcaccatgttttttctccatgctcataaatcgtgaaatcaaattccgcgtttcaccgtcaaaggatccgacattgacaattaaaatgttgacgagcctcctattcttgatataatatacagtttggcagtgaataacagtttcattttttttcggaacagaaaaaacatatctgccaaaagtatttgaaaatattttggaaaagaaattgacatcaaaaggataaatgttgaattacgggtgtggagcgccttagtgcatatcacgacaaaaaaattgttgtggtttaccttgctttataagttgttttggtaattaagtttatgaaactaaatatatcaagttaaaactactaatatagtcgtattaactcctctttcataagttaaatagtttaatgttgaaaaaaaatatgtttttttcttttcaagattaaaagaaaatgattaaccaacaatttgcctggaaaattgaaaaatattttctgacagtaaattaaaaattaatgaaaaaaacatatttttattaaaaaagctgaattatataggtaccataaggtatataaggtatagaaatgacaaacaaagtaaagaaaccatagaaaacacaaaatctgagtagtactgttttagcatgggagaattttcgtattccgaatctgaatcaaacttacgatcttgtttttccagactgctttgatgttggtaatacccagataaatttcttttctttctatttgttcccttagattttgaaaatatttttttgatcataaaaatggcagctaatattatcatggatgataataagaaccatgtaaatctatccatctttgacatcttattctccgcataggtcaagacttttacagttgaggacttgacactaaattcattttctgatatcgaatttatatcaacaagtttataattgaaggttcctaaaccttttttttcaactggctcaaaaatatttgattcctctggaagtaccagttctatatttttagtgtttctatactgatgttctatcagtaaaaccggatcattctgtgcctgtggtaccgtcattgaccgatgatagtgttgataaggataatcaataccgaagagaaaagataacagatttgatggatatattcatcacataagagtcaatgtgcataattaaaaaaagtatagcgattaaaactcgcttgaaaaacatcaaagcaaatctatcaaaagaaacgttttttcgttaatgaaggaaccttttattattaaggttttatcttcaatttttaccttttcaaactttctttcatgatgaaaatagttttgtgtgtatttctaattaaagtgttctatgtttagatatttcactcttcaatttgtaagatcacatatacatagtttctatcgtccatggataagttccacaattaggacgctataatacaccccgcgtggccagaacaatttaattgataacaaatcagaatactatagtattcaaattacgtaactaaattgtatattatgattgttgattgatatataataataatatttattctataacggttaactgaaactatacattgaatataaacaaatggattttatatatatatgaatgatggtaacagtcaagcaaagatgacaaaacaaggttgattaactgtaattttttttaaaattttaaaattgaaaattgaataaaactgaattattgaataatgaaattgactcaattattgttgagcacattgaacacctggttgtccaccttcatcatcttcatcttcataatcatcataatatccaccacgttggttagatgatctagattgatgttttattggatcaaagtcttccaatgtacatgaatcatcaacttcaacaccctttggaatcttaacttcttttctctttggtaagattttttctaattcctttaatttttcttcagaagtaaaattgtttggagggaattcaacagtgaatttaacaattaaattaccagtaaccaccatgttttggaattggcatacctttacctgaaataactttagtagaatctggtgcaataacttcacctggtaaagtggttaattttaagaattcaccactaacatgtttgaatgcaatttcaccaccagctaatgcagttaaaagatcaactttttgttcaatatataaatcatcaccctttctagtgtaagcttcatgtttcttttcttcaacaacaaaaacaacatcacctggaataatatctggtccttgatcaccttcaccttggaaaacaactctttgaccggctttcatacctggataaatattaacttcaagaatttttctttcatttgcaatttttttaccattacatgctttacatttatcagcagctgagacaatatcaccttcaccatgacaagcatcacattgaatttgcattctttgaatcattggacccatttgtctagtaataaatttagtaccaagaccattacatgaagtacatttcttaacatttttaccacctttaccatcacaagatttacaaaggatagttttatttaatgcaagttttgaaactttacccttgtataattcttctaatgaaacacttatagtatgtttaatatctctacctctttgtggaccttgtggtctaccagaacctccaccaccaaagaattgagagaagatatcactggcatccataccacccataccacccataccaccattcatacccttttcaccatattgatcatataaatctctcttctctggatcactcaaaacttcataagctgcagtcatctccttgaatttttctgctgcttcaggtgatggattcttatctggatggtatttaagagcaccaagtctgtatgcttttttcagttgttgttcagttgcatcaggtttaactcctaatgcatcgtataatttagtatctgcaaccattttttttaattaaaattatctatctatggatatgaaataaacgaaccggttcgtgtgatttaacaactaaatttacaagctaaaaacaaggataagacctttcaaagagttacagtaaataagattaaacgccaccagtaccaagttcttctcaacaattatataagtctaaataaaattttccaacttccttgaaaatttcaattttcgagaaccttctatgcttccgaaaagggaaataattaactttaattttggctacatgaatcgcactttttcactgtttcgagtagttacccgtttgggcagttgtattttaattctgtctatatattaatggtgaatgtagtatgttttagtgtctttaaataagattacttcgctacagagctgctcttggaggaggacgtggcggattattgctatagtttatccgttgaccattcgtagcattaccaggaggttgtgtttgttgtttattggacggattattatggttctgagaaaatgcatgatttccatacgtcgtttgtgtattcacctcttccagtggataaattccggcattgttataaactccattctgtttttctcgcataataagcattttagtgacctcggtatgtataattgccgcatttcttgtagaacaaccatttaaccatgcaaataacgatccgataacaggaggaaatgtcaaaagtaagtcaaacagtatatttgcttgaagtttagcaaccgttttagcatctaaatgataaaacataccagctttagtagttagtctagcatgaattgcgtacattaaaaatggtcctataactggtaatgcaacaacaatcggacctaatccaattccacaatcaacaggataacaacccataaaacatttatcatcaacccaagcacgcttttgtacccatttccacatcttttgttcttccttagttgcactttctctgagttttagcttctttgttttaccttctggtgtttcatatctataaggatccttagtttttactttttcttcagcaaactcattccatttgtcaattgcagtgtcaatcgcaaaatctttggctattccgccaacaaagccattaacgtagttcattataatgtcgttttgctcttgcagaaagaatatataggaggatgatttaaaaacattaaactaatttctgttaagcgatgcgagtttggcttaacatcaatttttgaacacctgcttaatcgatgacatcgaaggggctgtcttttcttttctgatatagcattttaatcaccatctaactatatatctacatatatatttacattttatatacaacaacaatagtttaatagaacactatgacgttcaaatttgaaaatttaccaagagattatgaacaattgcaagtaccggtgtatattttaaagggtcacagttcctcaaaaaaggacggagtcattggtgcttttagtgataaattctcagatcaattctatgaggttactgaaggctattttaaagcatacttagttttaagtcctggtgtgaacaaattcactttaaaacacctggatgggaaatttcaacaaaatggttatgctgcatacaacacggatgctaaaccatacgatgaaataacaattacattaaattattcacctattccggatactttattcactgttccaaaagttcatctctgtgtgctagttgctagagattctccggcattgtttgattgccctagcgataagttatacgagggaaataacttgaatacagctattaaaaagttacgtgttggtggaagattgatgcaagcatttacacaagatgaaatgagcaaaaataatgtcagtaaaagatgctttagatttgtagaagagaataccctttcaactatcagttttcaagaagaaatgaataaagttcaaagagatgaaattaaaattcacattattagaagtaagcatactgttgctgaaattagagatgccaattatgctcaacaaaatccaaatgcaaaagaagctggaaagttatttgattttgctttggaggcattgagagattatggtggagaattctcagatagtgcaacatcaaacacaccagcaattgcagcagttcaaattttagatgctcactgggataagtcagcaaatttgataagaggtcatgcagctttaggtggtggtacagatagaattaagttggcaattttcggttctcaaggtttacattcttggccaatgaattgggaatctgttcataaagcatttacagattgttcacccttgaacaccaacgaagttgccaatgattgtaatgaatgtagtcaatactgggaatgtttgtgtgtttctttaggtgcatttttacatgaaattggccatgcattgggctgtccacatcaagaacacggggttatgcttagagattataccacaatgaatagaaaatttttaacaaaagaaatgaagtgtattagaaccaaaaggaatgaatggggtcctgttttaagtaaagatgaacctggttggcatagacttgatataatgagattcctatttcatcctgcattctcattaccaggtgactttcaagatactacatttaaaccaatgtttagtttaaataaccaaggaatgaagttaccttctgaaatgtcagcagaaccaacttttacagcaattgatgaagatacacttgatattatgtgcgagactggtatatacctggttgaatgtcatgtcggcgaatggtcaagattaagttatgaatatttaccacaagtactgaacggaccaggtccacaaaaatatattaggttgaaacacagtatagttcaacaacaacttgcctcacagtttaagaatcaaccagttcacttggaggtattatgtatgggattcggccaaagaagtattgatgatatgaaaaaatatttaattgacaactctaaaacttttaagttgtcaaataatagaaatgcaaaaaagtccgatttatatggcttatcaaaatccaatccagttgaatgtatttttccaaataaaaaaattgtgtccttcagagttagccatggtatggcattggatggtattgaaacattctttgaagatggatcacatgttacatttggtaacgctaaatcacactattcagaattcaaacttgatagagatgaatttttaattggagttgcatttagatcaggtggatgggttgatagtgttcaatttatgaccaataaacgagtgagtaataattttggtgggaatggtggaagcatccataagattctcttacctaaaggtagtgagctggtcggattttatggaagtttgggcagttggatagatcaagccggaattttctacacgtgaacgtatgaaatgtaatggcgaaagtgtaaattaaatagaacattagaagttatagaaatattatttagaattatatttaaccttatttaccgaaaactttttcaaaagcttgttcaaaatcagcaattaagtcatcaatgttttcaataccaacagagactcttaataaatcttttgtaacaccagcggcaactttttcttcatcagataattgttcatgggtagtagtccatgggttaataattaaagattttgcatcaccgacatttgctaagttagagaaaatctttaaattatcaacaaaacgtggaccagcttctttaaataaatcaccagttggattttcaacatccttaacaccgaatgaaagaacagcaccataaccgttaactaaatacttctttgcattttcatgataagcatgagattctaaacctggataagaaacccaagaaacatgttcattcttttctaaccattgtgctaatttaagtgcattagaaccatgtctttcacctcttaaagctaaagtttctaaaccttgtaataataagaaagaaccaaatggattttgacatggtcctaaatctcttaataattcaactctaacgtatgcaatatatgcaaaatctccaaacatatcatttaagattgcaccatggtaaccttcagatggtttagagaattgtgggaatttttctggccagtcagagaatttgaaaccattatccttagctggatccttgaaaatgacaacaccaccaatagtagtaccatgaccaccaatccatttagttgcagaatgtgtaacaacatcagcaccatgttctaatggtttacagaaataaccaccggcaccaaaagtgttatcaacgataacacaagcacccttggaatgtgcataatcagtaatttccttaaaatctggaatattatattttgggttaccgattgattcaagataaactgctttagttttatcactaattaaagatttaattgattcaacatcatcaccttcagcaaatttaacatcaataccgaataatttcttgaagtttttgaaagcattataagtaccaccataaaggtaggaagatgaaacgatttcatcacctgattgagctgcagctaagacagctaataattgagcagcttgaccggaagaagttgcaacagccattgaaccaccttctaaagcagcaattcttttttcaaagacatcgtgagttgggttcataattcttgagtagatgaaacctggttctcttaaaccgaataaatcagcaccatgttttgagtctttaaacacatatgatgatgaagcataaatagggactgctcttgcgttattggcaccttctggaacttcttgtcctgcttggacacaaattgtactaaaatctgtttgaaatatatattaatgttagtattaaatttcaaagataaaagtggtgataacttttctccggtaccggtgaaatataagcattatctatgaactgtacataccggtcattatgatgattcttgtttaataaagctgaaattaaaaaatcatatacagtaagatcaaaattgaaattaaaaccgataaattaacgtatgaaagaatccagggaatattatctgattttatacttataggactaactatcttgtcgacagtttcctgttgaggtaacttattaaactgattatagagaggatgactccataatttttaaacaagaacgcattctccgtaactggtagagtcaatctgtgtataacaccgcaatttcacgtgacttaaaaaaatgattacgtaacttttagtttcatgatttctcaaatttaatactataagttgcccttttgggagttacccaaacaggaaggtgtatattttattatgcagtactcagaatgcatcaaatcacaaagatttaaaataaaaggcaaaagaattttaaagatgaagtattatttgagctctcaaaatctttcagagaacaggtaaaaaccttaaagataaatagtatggtttcaagtgcagcagtgacaacttccaataagtatttacaattagcaattgcagttattcttatcggtctttccgcaaaaaatctttccaatagatcatccttaggatctacagctgatgcattaagtgcatttaatgtcgcaaacaatgggacaagtttggacttagataattcttggaagattaatgcagctgctgtatcggctgctacattcagttttatttcatctttatttaattatatctttccttctgtaatcttcaaatattttatgccaaaagcggatcttatggattttaatattggctacacaacaaaaaagtatacttgaaataccatttgaaacattatctcacagtttcttttccgtttcaaaagctcatacaagttacgtatcatcattattaagttcagaagcaattagtcatgctttttggtttgttaatatgattgttcaagttagtgattttgcatcatataaatgtggttcagttgatagtttattagatacttataatgttacaggtatatcaggcactgatatcacaaaaaatttctttaatatttttgataattcatcatcaactacttcaatctataatgatttataccaatctcttttaaactcaaacttgacacaaatatctaacttaacagatgtttcaattggtaacttgaatggaactcaactacaaaccaatcttttattagctttatcacaagattgtcaaattaagaaatcttcaatggcaatgacaattatttattgggtctcccatgttttatcttctggaatgttagtaagtgaaatgacttctttttacaataaatttttatctatcaaaatttcagctgaaaatttaagtcacaaaaatgaaaccactacacgtcaagctgaagaacaggatgcagaagaagaagccaccgaagagggggaggataattcagtagatgaaaatgaaaaagaaacaaatgattcttttagacaaaaagtgtacttggtttttgatcatcactggggtttatttaatgttatcatgaagaagaaacctacagctgaagcttaattttaatttatttttctaattatttaataaattagtttttgttcaattttgctcttttttttgttgatatttgcatatagatacttaatagcaaacttttttatattttataagtaatactaaagaattatttgattatacacagcaaagtttaataataattaaagtatgaaagtcggacagaaatggagggatagtacctctttataaaaaatgagcagaactgaaggtagcaaagaaaatttaaaagtttaaaagaaaatgtggataaatgaaataagataaataattgcagatggtgctacatttttgtaagccaatccactaaataattcaacagtttgagcggcaacaaaaccacatacgtcagatgtagtggatgttggaatcaccacatctggaattgccgaaacagtgacagtgtaagtatgagttaccgtagtagtagtaggaataatacgtttctaatgctggggcagctggtgtttgtgaaataacagtaacataagtatctgggaaatatgtggatgtaatagtttgatatccggttgttaaagataagctttcagtaacatcactattgaaaacaattaaagttgaagttacaagctgctcatgatatttggtaatgtaactataacttaactgctcttccagtattttcaattgtactaatgtaagtagaatactctgtagtttcataatcggaataaatgtcagcgttggttaaattatagtaaccaggtaccaaattggctcttgttaagtatgttgatatcggggttgtaatagttgttcttatttgggacactactggaacgttaactgtaacagtttcaactgatgtaatagtttctgtgccagtgactattaaaagtaaggcggaactggtactgacaatataagttttggtggtgacatcaccaacaataattgtggtagtatatggttgaccagaagtttcagtaatagtatttggattgttatcattagttggggaatttattggatttgcacttgtaataattaaagtgggtgttactggagcatctggattccatagagaaattgaagttgaagtcttggaagtaactaccggtggagctggtgccgctgttgtagtacctggattattttgtacaggttctgtagctgtattttctggagcaacaacggaggttgcaattgatggtgtaacagtggtaattgttgttggaccttgacttacagttccagcaagagatgcatcagttgtgattaaaatacaaccatcacagttgaaatcgggattccactatatgaaataaattatattcttgttagtatatggttcaatcaaaaaagagaagatttatagttgatggcaaattgaagactatgatttgaaataaaactgcatcaaataaactggtagcactcttacccttgtatctgcagcagcaacaaaagatgttaagacacataatgcggtaaaaatagaaagcttcatcactgttatttactactctcttgaacaatacaaaagaaaagaagagaacataaagatgcactttcgaaaaacccatctgaaatccattaaatacacctcttctcctttgcaataaaggggcatttgttatattttgaaggctcatcacttttttctcaaactttttattttatttactttacttgatattatacacttaaattattctattgttcattttacatttttacgaatatccatctctatcagactgacaccttcgtcatgataaccacgtagaataccgtaactattatcagcttcataatcactgctatcataaccctcctcatcgtcatcatctgatgaaacataaaaatcactttcatcaaactccaatccacagtaaccacaaacaacttccattatatcattccaatctgctaaatctactatattcttgttataagtcttttgacgtgaatctaatccaacttctattaaaatattggttaaattacagttaccaaccagctttttaatggaagtgtttgaaaccgcaattaaaatcatatcgcttacatcaattgaatgttttgatttctcaacataatttgagattttatctgctatagtttcattcttaattttattattcaaactgtcattatctgaataccctatggtatcatacatttccaaaaattcacgatatttttccatagtatcgtttattatatctgtttgattttttccatttatgtttggcgtgtttgccaaatcattgatatttttcagatacgacttatcaatctcacaactatctataacattactttccattgataatgtagatgttgaacataataagagtaaaatatcaataccaatcattaaaagacttttcaccatattttgaatagatattattgaactttttatgagtttagattgattaataagaattattgctttcaatggtttttgttgaaatatcaatgagttaattgtaccctcataaaatcttggacaaacgccagtcggaagtcttctatgtccatcttctccaacataacttttcagtgttccaagtgtttctaaatcagcattatcatcataggtataaacagcattcgctttttcattgtttctatgatattcatctaataaatcatcaaattcgttcactttaagtgtactagtaattaagggtggctctatattaagcttcaaatttgacaaagctgatctccacttcgattctaaacccttagaattaaaaattaatttataatgttcttttgaatttttacttttcttaatcaatatagatcccgcttcactggagtcaataaatgtagataagttgatactaaccaaaccaaacatataatcatcacatctgatatgcaataacatatgttggaacaagtaacaataattctccttgatagacgagctttcgccatctttattaatagttaaaagattaatcttatcaaccattctgaacatacccagcgatttgatgaaatctggtgttaaactgaaccccatctcaccagtactttttataatatcatattctgataattcaactaaatcatctattattttttcttggaaattatcaaatgagaaatgattgtatgagttatgagactttgtatttgggttatgtgaagacgtaacaattgaagaagtacctaatgcaaatgatccccttgatggttttttgctgtgtgttttaggaaatggtatctttttagattgtgatgtaggatttcttatgggttttcaagttagggactcaatgaattattactattcaattcattattaattgttatgtgtttttcaacgggtacaataaagtcttcagcagtagtgttgttttgttgcggcgagtaagagatcggagtatttaatgtatcaatgtatttggagttatcagaaaaagctgtagtagatggagatcccaaagataacagagatgaattaatagatttgaaatggttttgtcatttgattagttattatgtgcgtgtaacaatctgttaaaacatcatcatgaacaggaatacattttgaattattatcacaaaaagaacacaaaggtaaaagttccataactttttgtttatcagtaatatgcaaacctgtaagtgaaggtttaaatctatttccataagtaaacattcttcatggatcatatgttgacaactcaactcaattattctttcatgtatcttgaacattatatgatacatccaaatctaggttacaaatgcaacatttcttttcttttactagtgatctcattttgactgtaggtgatgaggtgaatagaggtgttatcggtaattgataattcacttggctccttgttatagtaattattattttggtaacttatatcattgtttgaatcagtaatctccaatgttatcggtatgtttaaaagtcatttaaaatagggtgatgtctgtgttggaggaaactgtgtcattactgataatggtactgtgggctttcttggtttcctgcttgctgtgtttgaagtagttcctgaatttttgaaaagttttaattttttcttaaaactagcaatcttcttggtatattgttctgaagaacttggtacatttggaagcggtggtggagtcttaggaattttaagcgttttgggcgttttactgacattattagtcgttcctaggaaatgtctattaatatttggttcaagttgatcaatcatgtctttatccataaagctacccaagtgtagtcttgatggaatcggcttcttatcattttgccgattttgcatccttgattgtagtattgttcagatatgacgagcacagagggtatatatataatatatatgttaatgtctttccagtaaaagatctcaaacaaactgtaatattccataagaaaatgcacggaaattccagcccctggaaggtgtacctgaaacaaaacattacgtcagcgtgtttcactattagcatgtttttcttgagatgaaattatttgagaattacaatttttgaaattattaataagcttttctttctttttttattcttgaattttgagatcagtgacacatataacaactcgataatatatgaaggtgtgaatgatatgggtttatgtagtaaatctccaacaaaggcacctaaaacctacaaataattcaacaactaaaagcaataatggtatatcatttggcgatgatccaagtgatgtctggaaagccacacgagcagcttgtacaatagcagtaatgaaggttttccaatcattcagtaacaaggaaacactcaaaaaggaaatcattgaaacaaagacaattgaaaaacaggaggaacctagtgattttgctagaaagtacgagctaatgctttataaaaaacatagcaattcattgactaattataaattacgatttcgaaaagatttaactgctttaaaaagtagcaagacagaatttgccaaagatattttttttggtaatttgacaatggatgagtttgtagaatttgatgataaagaattgttatctataaaacagaagctgaaagataaggaattgttaaatgcagagctgaaaaattctttaggtcaacaattccccacaaacatcaatcaaattaaaaaccaaaatttaactctcccagatcaatggtgggcttcaggtagttctgcgaagcttgatacaaattttgatttagaataaaaagtttttataaacaactatatctgatataaattatacatatcacataaaatctaatcaatttcaatgatacttacttcctcagatgatgaatcaataacctcagccgactccatcaacctttcatctttttgttttttcaaatccttctgtggagacaaatgaccagactcatttagttctaacaaaggtaaatttgatgactttctaaaattccttgacacatgttgttcaatatcatgacttgtctctcttttgaatttgccaccactttcattattatcaacgaaaggagtatcgattatcaattttgctcgttttgtatcacgtaattcattcgtaaagatatcgtttttccttttcaaatataagttgtcattctcaaccgaacccgtgttttcttctaccttggaatcatctctaaaaggtgtttttattggtgatccatttttggtaggagatattttgaaaaagttcgtgatgtgtgattgtttggttgctgaaccgaatgttttttcaaatttcgtttttgctgctgtttccttattagtatcacttgttatctcactctttctatcactattttcattttcaccctcccttttcaaaaattcaaccctttcagagtcatccttaatttcactattctgaacatattttggtgtatcagataaaatttcactattggaacgagttttaaaatcttcggatataagatcaagtgatgtcaatttactcggagatagaaatggattggaagattcattaggatgtaagacatctagttttgaatgcttatcaacagcagcatcgtaacttccagtttcaccacccaatggagtgacaccacggccactttcagaagcacctgcctcaacatttttcctattaaaaagttcgttaacaataggtgcattttgcacttccgaaggtatattgctgttttcagaattatttattgaaacttcaatgttagtttctacatcaggcgtagagattttggatactgtatttgaattatcaccagtagcattatgatgactactgatttgtgatttgacaatatctcttaattctttcaactcattttgtctcttttcctctagtaaaattgcttcttcatcagctttctttttggctttttccaaatcagtttcgtaaggatatagtcttgggatctgaaacttgtccaatatctcattaaacttagctaattcctctgtattcaatgatctatcatgagcagagattaatttttcaaattctttatcttccttattttccttagtctcttttgtcataacaccaatacttgaacgttcaatctcatcatcatcatacgtacctgataaattgtagttcaatgtttcacattggttagtatcatccttcaatttttcaacaattttggctgtatttaatacaattttacttgcatgtggaacaatatctcttctagcaattttcaccttttccttggtaggagttccattatttgcatcatgaagagataaatagttaataattaaacacttttcgtcaaatgttaatttggaaacatcagtttttgcactattaacatcatgaatattaactttgatttgttgactttcagtttttggttgctcaacaactgtatttaattgcgtattttggatcatcttcaactttattcggtatatcgggagttgattgttttgatttggtttcataaaatatttttgaaagatgaagtaagtgtgagattgaaatattgttacctttatcagccataatggaatcaaataaatacggaataaacattttcatgtaaatactcaagaaacactcatcaatagcacccgtagctccaaaaccagtagccaattttctaaaaccttgcgtttcattcaaaaagtagaggtgaagtaatttttcatcatcatacttttcattatcgttaaattcatcatcaaacttagaagaataagtgataaaatcagaaaacttaataattgaaatcatatcatctaaaaatccgggttcaacagaaatactatttttaataagaacacatatacgtaacatcatattatcgaatgttttagttaaatttaccataattgaaccagcccttctcatctttttaactagtatgatgagggaatatagatcaccagactcataaagtaatttaaccaagaagttggtataaacagcattgtagataaaatgtttaccaggtctttcaatagcaggtttccaaatagtacttaattgtctggtacttggttttaggttgataatagataacatctcttcctttgcattctttatatcatggtcaaaatagtaataagattccgctaatctatacacaggacgatgttgccaatttttcttatcgtatgaaattattttatgtaaaattttaagtgtcacgtctctaatagtagcagtttttaaaaattcttcatcaaggatgttttcaaataatgaattttgacaaagatagttataagcttccccttgtgttaatttattcaatttcaaatatttcataacagctgaaaaaaggtaataatgtggttcaatgaaaggatcatccttattactttgttttaaagctagatcacacgatatgaccaaatatttgatgattccatgataatcttttgaatcttcattatatttcaatttcatcattgccttggataagtacagataatcaaaccaatttggatttaattcagtagcaagcttaaacgataattctaaaattttgaatactgcattacttggaattttattactcttcaacttcaaaaaggcaggcttaaaatcctcattcttatcagaatctataaatatatggaaagcatttttgttcattggttccatccatgaattataaagttctttaccaaatgaattccaaagggtgggtaaaacttctttaacagattcctgctcatgtcggttttaatctcatataaatcgatatcgcattaagataacacagcaatgctttcttctctgtcatagatgtagcttgttttctttccaaagaatttaatttatctgctgtccaaatcaaatcatcttcaacagtaaatgaataaacttgcccaagtgcaacccatgtctcaaatctattgcagccacaaagaatatcattctcaagaacttttataactttaaccaattcagtagccctactctgcattgtccttttacgaattctgaagaaatgaagcccaactaaaccttcaagatagtataagccatttttaccaatttcaactgatggttgtgaaggtgtcgtaaattctaattccattttaccattgaaaacattagtgacaaaacttaatgaaatattttgatctgttaagtatgaatctaactttttcttatttcctatcacaactgcatcattttccaattcaccaacagcttctataacgctatcaattataagtttcatatcatttctaggaggtgaagaaactggatgtttcttattatcaaaacaaaatttaaaaacaaatctggaagtttgaattgcatcttcaagtgtcatcttttttggtttacatttatgatcaaatgtatcaaatctatcaagtgaaattgaaaaaccaaaacgacaatgtaacacctgaaagatatcattacaagaaaatattatatctattggagtcaatttataatgaatgaacttcaaaaaaattccattatcaatagatgaacataacttgttgattcccaattgtaagtgacaaacactgtaaaaatcagtaatagtagatggtaatgtgatattcaaggccataggataatatgctgccaaaagaaagaaacatgaaacataacattgattaaagacatcagttgtagcattattttgagttaaaatattatgacggacagttgatgaattattttttttataagaaaaataagcaataacgacgtagagtattctagatatggataccatcaacatttttgcctctttcttaatatctggagttgtttcatagtcattcttaaaacattcaaacctggttagcatcacagaattgaatgaatgttttagagaagtaagtgaaaaaacctattaaattcaataatctatattttgattcctcaaccgttaattctttcattgattcatagtttaactcatgaattatcattttgacaacacttttcaaatgcatatttgtaacccattatatcttcttttattttataaaatcttaatagtagggaccataaacgtaacttcatttctaaattagattgagaaataaaggattcaagctgtaatctcaaatgttcattttccttttgtgttactggtttctggagtaaaacagattctaaaatttcattggctttttcattagaatcaaaaatcttcaagattctaatcttagaaagctgagtttgaattgagtcatatgaaagaacatgggatttcttcaaaatttgtatatggaatataatacttttctacttgaacgactgtagaaagttgttgaagaatatcagttagttttgatgtgtctatagattggattatttgtttgtaaaaagaataaatcaaaccacttaaatctaacccacattttcagattgttaggtgattcattcttcgaatatatagtgaatgtagtatttatcaatttttgccattttttaattcttgtcacaaataaagttctcggtatttaataaatcaagcagaggttgccttactactattctttttaaccttaagctctttgacaaattctagatatgaagagactaatgtttcgtatattgatattgctatatttaattgttcttcaacattttttatgtcttcatcgtaaaggatggttttttcaagttttttataatatgaaatactcaatgaatcaactattgttttataattacttgaaggacttttcagaaattttgttagccattatgattgagttaccaccttctcttaacttgagtaagtactctaaaacttttattctaagttgtgtaaaatgtatatcaggcggctagagactttagttcatcatacaaatctagataagttacagtttcaaaaagttcagttgatattattttagatgattttatattcaatatttctcgtacagtttcatcatctttacctttacttttcttcttcttatcagtgacaattaaagattgagaatattcaggataccagtttttcaaagatgactcaaataatgaaatattatacttaatatcatcatcttttattattgttggcactttcaatagtttctgtaaatgaatcaattttatcttcaattccacatttcaataaataaaatggtagtgttttagtgacaaatatctcatgatcatctattataacagcatcattttgactatcagtaacttggttcaggctccacttttacctctcaaacttcgggtgtttctagtttgtatagattttatatcaattacaccacatggaggtggtggttcatctttggcaggtaaaattggaggatcttgatcattttgtttatccatagatatatccggattaatatcaatagagtctggcaatgtattattggaatctatattaatgttttcactatcttcaatagtttcaactatagttgattgaagttggatattaattttatcaatcattgcatcagttaataaataagaatcataaattttatttttacctcttggctttggaacacagttaactatcgattcaagtaatgaagataataaaattgattgattagattcatcataatcaagatttaattcaatttcagaagtattatcacgttcctcaatccattgatcataagataaaattgtattccaattaactttagtagttttatttgattttaactttgtttcccatatttgattatttgaaagacattttttaactttattataaacaattgaatgtttatcctttatattatctaataattgaatatatttaactaaaatattatattgatttaacaataaagtacttgaatcatttaaatcaattttaagatcatcattaacattcaaattaattttttttatcattatcatcactaattttcatttcataacataatctagctaatctaaaatgtttgaaatgttcaaataatgttgctaataatttaatcattttattatcaggttcaccaaataatgttgcatttaataaatcattgattgatccaataatttcaccatatatactaattgtgcaatcttcatcagtaatattatttttatcttcaaataatgtaacaatttcccaaattcttaacataccacgatttctgcaaagtaaatattttaatctattaattattgtattatttgactcattttgtaaaataagtatatccatattagccattgaatcataaactgaatgtgcttctctaaattttttatctttttgaagttttaatgctttatttaattgattaacaattatctcaatttgtagttctcttgtatgttcctcaatatctgattcatcatcactcacattgagtgttgtaaaactcgactatagaatatatttaaatatgttagtaaatccatttcaaggggattatttcattaattattctatacataccatgtttatgtggctgattgcagctgatgttcgttggttgttgtataaagtatacctctagatgatgatgtatgtttattcaatcgtgatctaagaatttctgagcgaagtgaaaatatacgattttttccagtacaaaaattgatatgataaattcttgttttgtttagtaaagtaagataataatacacagaattataaaactagacgagtgaaggtataagttgtttagtaggtaggttatttgtagcaaaaattctaaaattgccaacaaataaataaattcgaaatttagaaaagtaattaattaaaagctctgaaatttaatttcatctttaagttttgataattcatcagtattttcttcatcaatatgttgtaaaatatttaaagccatttgatctgccagtaaatcattttgtcttacatctaaacttttatctaaatgatcaatctgattagatttagtaaagatagaagatactgaatcttgtaaaatattaatgtttttgtcatttgatggtaatgaaggataatctgcatcaataactttataatatttatttggtgatgtagatgcagaagctgatgatattgatgattgattaaatgatattggtgttcttatgcaagattctactgtaacaccagaatttgatgtatcaatattattattattattattatttaaatcatttaaaattgcagaattggtaattattgacgataaattagtatttgaagattgtgaatgttgacgttgtgattgaaaagattttgattttgatctttcaataatttcaaaataattattatttaaactactattattggagtcgggtataattggagttagctgatcttcagtaaatggaggtattgaggtatcaatggggttttttggtaataaaatgatttcattttcaatttcattattttcaggtatattacttttagcaatggcattgctctcattaaaaatatcattattattactatgagtgatagaatgattttcagtatcatgaaattgaatattatcatttatgatactaattttatcatgatttgaaacattatcatcattcaaatgcatatgagaggtatgaggtgtaatataggttgaatttgtatccatataatctaaagaatgttgacgaatacttcgacgtatactatttgaacgtcttttaccagtatataataaagttggagtattatcaataagttcagaattcatattaatatttgaatttgaatttgatactgaagtaccagttgatgagtttatattgatattagaacttgaatttgagttagaatttgaatggagaattggacttggtatggagtttaaatttatatttagattatgagatgaagaaaaattatttgcctgttgtatggatatatggttatgattattattatgattatgattattattattattattattattattattattaatgttattattattattattattcatgtgattattattattattattgttatatagtaaagcttttgagaataattgagagactgacctttgtattgatgaaagaggagtatttggagttgaacaagtatcatcatcataattatcagaactattttcattatgatgattcaataataatcttttagtaacggttggtattgaatgagtagcagaatttgatattgacatttgtatcatatcgaattgaatatctgaattttcggaacaatcatgtaatgggtcatttgccataaataaaccacaaatttcacaataatctgaagtattaatcattaatgaatttcgatcatactgagaatctaaggttggagaggaaactattcgttttgttctagctaaagtatttttcaacttcattgaaagtgatcgctttatagtcatttttgataattatactttgatattttgaggagtatgtttaataagagagaaaaaaaaataagtgatgattaataagtgatgattatgatgttttgaatggtttagtagtatgataatgaatgaatttgtttataagatgaataatgggagatgtatatagttatacaaaaagctggagttgtgaaaagagccaaagaagttataaccagtgaaatattaagaaaagttaaaacactcagctaaatcccatcatccagtggaaaaactcttgtttcattcatgattactatgtaaaaaatgggaaattgctattgcagaaaaagacgtttaacctcggaaattgcaatatacgagcaggattttccacttataatttgttacaataattacttacatttacattggtaacttgtgattgttaaattactgtctatataatcttgaattgcttatctactacacaattaatccagagcaactttcgacaaactggagataaattaatcgattatgtactatggattaaccctctcaatttgccacccacttttaataatattttaccttttacactcttaatcttattatgaatggcaatgaaaaccgttgaaccaccacaaaaccgttggagagccgcacatgtgctcaaaagggaaagtgttctaataaaagcaggcaaaccggaaagccgcatttgatttgagtttccattgtgcggctcaaattgatggaaaggtctggactttcctcttgggagagggtgaaaaagaaattaaaaaaagttaaaaatttgaaaaaaattaaaaatgaaaaaatttaagaaactctacatgctcggaaaattgaagttactttatagagcatttctcggaaattttgttatgggaattttacataatcgtctattaacctgattattttagtgctactggaactacccactagtaaatttattacatcgatatatttcaattctaatattactacctgacttaatgcaagcaattaaaagaaaaactagaaatgaaattgctactattgtttcgtcaattgaggtttctcagttaaatgaatatggtaaattagttgcaaatgctataaatacaataccacaattaaattcaattaaatcagttggtttatatttaaatatgccaactggtgaattaccaacagatcatttacttaaaaattgctttgataagaatattaatgtttatttaccaagagttgaaaatttgaaaactcataatgataattcaagatttaataaacaatgggggtgtttacattttattaaatcaaattcttggaatgatgttttaaattatcttccaagaggtcgttataatttacgtgaacctccatatgaaatatctaatgatttattattatcatcaaatccttcattagatgttttattcttaccaggagttgcatttactccatctggtagaagattaggtcatggtgctggtttctatgatgatttcttagctcgttatcgtttacttaataacaataaacttccaatacttgtgggggtttctttaccacatcaaattttatttgatagcgaaaaaatacccttagaggaacatgatgttttattagattacgtagtggcaggtgataaagtctattcttgtaaagattatacaactgtataaatttaagaaaataaataagtaataactacataaatataatgttcaaattaatacagcgtcgtctatattcaactattaaatatccaccacctccatctcattatgaaactaaaccagcaaagaaatattggaaaaaaatctcatttttagcattcgtttcaggtgctattataacatataattatcctatatatacaattgttgaaaaatcaattccactaccaaaggatgaagaagaaactactaaatacaatgaaaatttagaatcaaaattaaataatttaccactcgttaatcattatagaaatgataaatcatttattgaatctcgtggatggcatcatctagagactgcaactgcaggtcttgaaggtttccatggtactttattaactcctggtggaattgcaattccctccattagctttccattcagaaaatggtgatgatatcgtatttgttcatgttggtagaagattatcaggttatccatttattgttcacggtggtattcttggttcaatcattgatgaaactcaaaaggcaaatattattaaagaattcccatatttgactcctgatacaatccatacaaaatctcttaatattaaatataaattcccaacatttgtcaatcaatttattgttattagatcaagtgttaataaaagtgatccaaattcgaaaacttatacaacaaaggcagatatttctacaattggtggaactctgttaatggaagctacttcaacattatcagccgaagatcctctatcctttgaatcttctccatcttcttcctctaaatggttgaaatggtgatctgcttgtaaattatatagttttagttatactgtttatatagcgcttacgtaataccactattttcattgacagaaagttcgtgcaaattatttttttcaacattaacattgaacaatttcaacattaattaaggacttgttcattttaacttctttttgtttattttacttgatttaccaacacaacaaacacaaaaaacaatgtcattccttggttttggttcccaacctcaaatttctactgaacaaaaaatttcagctgcagaagctgaacttgatatgattacaactatgtttaatcaacttcttgattcatgttacagaaaatgtttcgataaaagttataatactgaagatttaacacaaaatgaatccctttgtattgatagatgtgtctccaaatattttgatgcctaatgttaaagtttcagaatctatgcaaacagttggaagatctggtgtccttcaacaaaagaaataagtttagttgttcttttatgttatttagtatataaaaataccatatcattattattatattattataattatatagcgcatctatttacagtacttgaatatagtttattattatcaatattatcataacttttacattccaaaagctctaaaaattctcattcgaataccttcaaatgtatttaattttggtctaacatcgaggaaaaatcttggttcttcaccttcattaacctttgtagtataaaaatcaataacataatcaatttcaactccgcatctattaactttccaatcatgtctatcaaatggtaattctttaccaaatatataatgatttattgcagctctcggtgtaattttctttgcatcacccttaaatgaacttaatttaataccaccacatttatctccaccttgtccgctttcccattgttggatatatctccatgcaatttcattaacttgattgtgcaatggaacaacagttttcatatctttctcctcaggttcccaatttttacgtttcatagcattgaaaaattgtttctctgatggataaacccaattaccattctctgatgtacgtggtatactggaaatttctctctcaagtgataatccttcacctaatgtagcatttgatggtgtttctaaactttgatcaagattatcggatgtacattcaatagcttcaggttcatttaaagttttacgtaaaccagtacttggcgtgacttttggatgttgtggtatatttatttgttgtgatatatctggtttaggtgtggaactccatagtatattcttccatgaccattcatttgattgattacttaatgtgtttgattgatttaatgcattttgaaactctttactacgttgtgcttctttggatttttgaatccataaatctctagttttttgatcaacgggacactttccttcactcatcgtatctttgtaaaagtcgttatctgattgatataattagtaataaatacattaataattttcaaaatttaaaacaataaaatttcctgcgaatcatgttgaagtttttaacaatcagaatgtggcgcatatattattactatttttgtggcgcattatttaaattcacgttaatccatgatgtagatttaataaagtcattatatgtataaaatataaaaataagtatagaaagaacatgaagaagaatatttaaaaaagttattcaaaagatggttactggaactcagtcaactcaccacaaatttgcacgtttaaccatatctaaaacgttatctgcttgcagtaccattattgtaatgatggtgtatcagttgcaaaactggtttccggtaaggttgaataagttgtagaagttgtagttaatgtgacatatgtagttggttcgactgttatgaaattagttttagtaattgtttgaactgatgtattttcaattggagtttcaacattagttgaagtagtgaaaatacttgtactggaaccataagtgacagtcattgtagcagttattggaattgtaactgttgttgtaccaacatcagtggaaatcattgtaacttcttgtaattgaacatttgatggtaatgaagaagttgtagcacaccaacttggagtgattgtaactgttgaaacggcacaagttgaagattgaaatgatgtactaagtaatgatgcaatatctgcaacatttgcttgtttaccaaggctctgtaattgagtaatgaaatcagaaatttgaatttcatttccagatgttgaagaagaaggtaatgttgtggatgcaaccggtgcatttgtaattgatggtgtttgtgattgaacaattgcagctttatttgccgcatcaacatcagaagttgatgagctatcaagtgtaacaatgacagttgatgtaagtgtataggttgtagttaatgaattaccatgtgagtcggttatcactgtagtttcaatttctggaagtacagttgttgttaatgcttcatcagaagtggtaactggtatagtctcattgtcatacctttttgccaaatacttgtaattttgaagtggtgctggaagtgcagcacataatgaagtaaataataaagaatgtaataagattgttaaattcatagtagttattgtgtagttctgataaaatatgtaatgaatgaatggatcgttatatcaactgaatgttttgatttagcttttttagtaatgaatgactggttgaatataattagatcaggtaagttaacgtgtttagctgaatatcaggtagttgacggaggttgacaatgactagtttttggatgttttaacaattgagtttgtttgtactttgagtattttaagaaaaggttttgaaaagaagtatgtttagagtaactaaaagtttagagtactggaaaggaaaaccatacgtgatatctagaatttaaagaattgtaatacttatataccctgacacgaaagttcatgtatcaattcccctgaaaagtctgtcaagtatcgtgttttagcagtttaacattgtacaaatgtatcgtgataacagatacaccgtgttcctattatacagagcgcgtttgtcacatttgaaaagtaaacacaaacatttgagccgcgtttctattttctattttattatttttacacgttaagcttggcattttaattgctatttttaaacttgaatactttaatattattttcatgaatctatttaaacaatataaaaaagatattttacattataaatctggatcaactttcgtacccaaatgctgacctctaagaaagatagtctctcctacactatcagggaaataagtttgttgaacttgtccgttgcgataatcagggttgtatttgtacccttttttataacccaaatcactcattaacttagttggtgcattacgtagatgtaaaggaatttcagcaccttcaacctgtgaagcattcatccatgccttcatttcattccaacctttataaatttctatacttttaggagctctagctaatttaacagcacaatggactaatgctaaatcagcttctggtaatccaacatattgaactgcattatatgcagctactgcaaatggtaaacatgaatcatctaaaacacccacatcttcacttgcaattcttatcatccgacgtgcaatatataatggatcttcacccccatttaacatacgagcaaggtaatacattgcagcatcaggattagatccccttatagatttatgaaacgcagatattgtatcataatgtacatcacctactctatcatataaagttggtgattttttgattaattctttcacatctttcacatcaacttcaatcacaccagaattatccgttgttatcattcattatactcgaatcaaccatttcaacaaatcctaaagcttgacgcccatcaccatcagatattcctgcaatccaatcaattgcatcaggtgaaagtttcaatacattggtattatgaatcaattttcttactttgttgatttcaactaatcctctacctatcaaatctcttatttcagatttatttaatttttctaaggtgaaaactttacatcttgaaagtatagctttattaattgtaaaactaggattttcagttgttgcacctattaaaataataatacctctttcaacataattaagaaaaatatcctgttgatttttactaaatctatgaatttcatctatgaaaataattgttggtctcttggttaatttcatttcatttgcagcttcttcaaatatttttttacaatcagatacaccattcattacaccactcatttcaacaaatctaagattggtagtcttggctaaaatcctagcaagtgtggttttaccagtacccggtttaccccataaaattaatgatggaactttaccaagttttaaataacctcttaaaattccacgttcaccaacaagatgtgattgtccaatatactgagcaatacttgttggccgaagtctttctgataagggtagattacttgtaattttcaagttttcaatagcggaagatttatgacgtttagattctaccattgtgtgatcttcatctattgtacgttttatcaccggtgatgagtttggttgaattgttattttttcagatgaaacatttgattgtgaatcaccatttggtgtatattgataagatcttggtttttctttatgttttttctgtcctgaaagaatcgaagttagtgatttaggttcagattcatgtttaatttcatttttggttttgggtttttcaattggaggcgatgggtttggcgttagttcaattggtgaatcagattctggtgatttacttttcttatttttcttatgattaaattcacatttgtctaaatgattattgatttgtgacagttcaacttgttcagaacatataggacacttcaccattgcatgtgtaacagaaggagataaatcgattttgaataataaagatttaataagacgcgtttataaaattatttagtgttacaggacctataaagacgtgatagattataattcatccttttctaactgttttttagcttgttttttagcttgtttcttcttgtaatgcaagaaactcttaactttaccgttttttataccttcaataatcttatgtctttcactgaattcaccttctgaaggttcagcaaattgagttagaaatttggatatattatattttgataatttatcttccattgtaactattcccttctttggatccacaactaacaataccggtgaaccttcactgtattggaaatctggaatcagttccttaacataatttgcagtgtcatcattgtctatatgtacataagtgaattctaacaaatctttgaaatcaatcgcaatagatttgtatgttgctgaagctgtaaatttatctgaaaatacaaataactcttggaattgttgatgattcttcaattttaagatattttggtaaatgtttaagtttgagttttcttaacgaatgattttagagtacctttcattgcatcaacaaatgatgcagcatctcttttattttcataaggttgagtagcaaattgttcctttctttcaatattttctctaaaagtttttggaggtctgtatgttataattgtaggaaatcctttaatattattagctgcacataatttttgatttttctcttcatcacaattaacagcagcaaattgtgcataattatgacctttctttgaagctttttcaaattctggtctaagttgtttacaataaccacaccaaggagcataaaatgccactatagttgtataatttgatgaataaataaaatcatcaaaattaagtggatttaattcaatgatatttttagaatttgaataatgtggaggttcataaggtctttgacttcttgcagcagtgaaagagatacagaataatagtgttattatatttgataaccacattctatttggttacaggaagaactaacagttgtctagatgaaaaatttcagattatgcatgctgtgtacgagaacctgacatgaataatggacttaccggtctttaatatggtattgtagattcttttttaaagaagtatttttagttcactcatttagtgttttcattctgctattttatattacacccatatcaattgtccatctctctatcatcaataaaagtagggttatatacaatgatctcacttcgatgtcctctattccaataaagtactgatgatactacatactaatacagataacctaatccacccatagtaacagacgcgactattcccatttcctcactgaggaaattcattttttcaaatatttcactttttcactctttcaaaccaaatttcttggtttctacagcttcttatagaacaacgatgatcactaaatatttcaccaacgtcaccgtccgtttcaatccttttggtaaggaagcacgttgtgcaagagctgttctctctcaaattcctccatctttaaaaacttcatgcaaaataaaccttgaactgttaaacgaccagtcgactaagaaaccattcgtagaggttgtattcaaggataaaacaacaatgagtggtaaccctggtgaattagcacttgcagattttactaatatgtttgataaacacagtaagaaacttttattcaaggaagaagtcgataaatagtgtcatgtatatagtccacacattttatataatagatctttagttttaataatatttacgaaccattttttttttcaaacttaacttactttctttatgcaactttgaaccagtattagaatatatacattgatacttgattttcaaatagacaataatgaaattatctttgaaaacggtgtataccactacaccaatcttttatgtcaatgctaaacctcatcttggtcatttttatacaatgactttggctgatgttagaaatagatggtgtaagtttaataatccgagatacttttttcacaaccggtacagatgaacatggtctaaaagttcaaaatgctgctgagaaggcaggtattgagccaaagttattctgtgatggacttgccgataagttcaaagaattggctaaattaggtgatataaaatatgatagatttattagaactacatgatgtagatcattatgctgccgtcaatcatttttggaatacagtaaatgataatggttatatttataaaggacagcatagtggatggtactccgtttctgatgaaactttctatacagaatctgatattgttgaatcaaatgatgaaaagactgggaagaaaataatgattgccaaggaaacttatgaatgaagttatattccaaacagaggaaaactatttctttaagttatccaaactgcaaaagaatattttagattatattaaatctaaccccaaatttatcaaacctcaaaaatactatgattttattatacacgaattagaatcaagggaattacctgatttatcagtttcacgaccttcaagtcgtttacaatggggaatacccgtacctaacgatgataatcaaaaaatttatgtttggtttgatgcattggttaattatttaacttcagaaggatacccaaatgccaaggaattcccaaaaccaacacatttagttggtaaagatattattaaatttcactgtatatactggccagcatttttaatggctgcaaatattcaattacctgaacaagtatttgttcatggtcattggttaatgggcggtagaaaaatgagtaaatctagaggtaatgttgcagatcctattgaaatatcaaattattatggatcagattctttaagattatttatgatgagatattccgttctagatactgatggtgattataatgagaaaactttaaatgcattaagatctgaatttattgataaattctgtaatttaatgatccgttcattatctaaaaatttcagtatcgagagagctttaggtagattaaaatcaaataaattagaaactttattaaatgaagttaatgacgaagaatttaagaatagtatattgagtgttcagttacaaatcaacaacttgaaaaatgatattgatgatgatataactaactttgatatgtacaaagcaacacataaactattcagtatgggaccacaaataaatagtttatttgatatttatgaaccttggaaattgaaggtaaaacaagatgatgatgaaatgaccaaacataataaacaattaaaacaagatataattattttcactgcattagactcattaagagtgttattgttattatttcaatcaattattccacaatactcaaagatgctattggatagattaaatgttgattcaaagaaacgtactgttgaatacgcaactatagcatctgattttacatacggtaaaaacactactttcaaaaaaggtgaaaaagttccattaacaaaacttgaagttccttcaactgtataaaatttcctgtatataaaaattacaataatgactaattgaattcaacggattcacaacgaagcgattgtaagtccaacaatacacatgtgttggaatcactaaattttggtaatgcaattattctaattgtcactgattcaccgttcttacgtttcaattcaatcagggaggtttcatattttggttgattaccaatcacgtatacgtgtggagtttccatcagcgtaaatggatcactattttcaaatggataacaccataatgtatctggagcagttggtgcaattatttgccatagtaaagaatcttcaataattcttaatcttgaatcattcgttatagattcatcaatgaggtcttctgttacacttatgttaggaatgatgtatttcattatatcgtcaatattttcgcctgaggttgcaagaattctaactccattaatttcataaaatgaaggatttgtcaatctatggaaattttccgcttttgaagatttactaaataatgattgatgcactgcttgttttggaagaccggattcaacaacatcattgatcccggacagaagactaattggaacactttgaagtagtttggaaaaaaaatcatctaaatatttgactgatgcttcttcatattgtgaattgaaatcttcaatgtatttattctttttcggtttattgcttttaatttcagtatcgttttcttgtatatcattaacacctaatgagttacctagaatcatcatttcatttattgatgaaattctctcaatatcaccaaattctccacatatccaacttgaaagcatttcgtactttgagaaatcacttttggaacttacattcagtccactacataacaatagtttaccttccttattcaagcttggttcaatgaccttttgtggtgctgctttcagggtacataatatcaacaacatggaatatacctgattcaatttccatacctaaaacaccaataaccaatccagtaactaatattttcttatttagtaaatcacctgttaatagtattctgccactttcatcttcaagccatagtttatcagtcttaggatcactatatgacgcttttctcaatttatcaatgtcttgcattgaatctggagcttttccatttaattcattcaattctttgaaatgaccttgaacggataattcaacttcttttaaaacatcgggcttgtatttcatatctgccagtgttgtacctataataaaacatggttttgaaaacggcacgtctagaattttggggaaaaacttagttttcattccattgatatcacaaccattccacttaggcattgctagtttcatgacacgttttttaagttcatttgatctatgttggtacaatgaattgaactgtgattcgtatttacgcttggaaaaagttttaacgaatgtgttgtcaattattacttcagaatacactggggtgtctctatatgtttgatccatattgtttgtcattatcacacatgcagttgacaaaatcccagacgccaaagtttactctacttttaaattagatcgatgtaaaattaatgttcctcgggaaaagattcaaattttaaaattattaacatctctacaccgagcggagatggctgatttcatttaggatttctaactaatgagcaccttaattgattgttcgatggcagtggcgtttactgtttgattttaaaaagaagtcttttatttacacaattgggtcaattggtcatcaattaacaataaattataaaatatggagaaattagatttatcttcctacgcaaaggaaattaagaaagcatatgatgatgttgtttcaggtgcacaaagttatgctatttttacaacattaaaagattcatcattaaagccaacaacagtctctgatggtgatattagagattttgtctctgaatttgaagaaggttctgttcaatttggtattattagagttaacccatttggttctgatgttcaaaaattaattctcctaggttggtgtccagattctgcacctatcaaatctaaagtctcttatgcatcaaatttctcaaatgttggtaaaatattacattatcatgttgaaattactgctagagatggtgatgatttagatattgatgatattatgaaaactgtttcaaatgcttctggtgcaagatattcaattcaaagtttgtccccatcctcagcatcatcaggttcaaaattcaaaccaactccaaagcctgcctcaaatactactactgcttcaaaaccatcaccagtatcaacaccaactattattaaaccaaaaccttctttaccaccaaagaaagcagaagttgatggatggggtgacgaagaagaaattgaagaaagagattttacaaagaatccattacaaaaccttccatctgcttataaaccaactaaagttgatattgatgctttaagatctggtagtccaaaaattgaaaaagatgaagctccaaaaactgcaaccatgtcaatcaatccttccggtggtttaacttcattacctaaaccaaaaatttcaaactctgtcttatcaagatttaaccaagatgttgtcaaacctgaatttggtactaaggctccagtatttgattctaatccttccagagattcaacaaagttagttggtggattgagtagaaattttggtgctcaaaatggtaaaactccagcacaattatgggctgaaaagaaaggtcaatataaggaagttgcaaatgatgaaaaaccagtcaattctgaagactatgaaaaagaaattgatcaagaagatattggtgttaatagtgcaaaggctaaatttgaaaaattacaacttgaagctgaaaaggaagaacaagaagaacaagaaattaagaaacacgtctcttcatttccaccaccaccggctagaaccgaaccagctgcttctttcccaccaccaccagctagaactgaacctgtttcttctttcccacctcctgtttctggtggtctaaataaattcaaagaagaagaagaagatcaaccagaaaatgatggctgggatgaagaagaagaagaagaagaagaagaaaaaccacaagcaaaggaagaaccaaaaccagcatcagcaccagttgcgcttccaactagacagcttccaccaccacctgctgagccaactgttgaaaaagtaccagaaccaacctcaaaagcatcaggtaataaagctattgcagaatatgagtatgaaaaggatgaagataatgaaataggatttgtagaaggtgaactaattattgatattgagtttgttgatgaagattggtggcaaggaactaatgcaagtggtgaaactggtttattcccagcatcatatgttgtcttacaaaaggaagaaaccattgttgaatctgctccagcttctgcacctgcaccatcattaccgtctagagatactgaatctgaaccaaaatctgaaccgacaggaccatctgctattgctgaatttgattatgatgcaagtgaagataatgaacttacattcaaagaaggtgatgttattaccaatattgataaagttgatgaagattggtggttaggttcatttaacggtgaaagaaaattattccctgctaattatgtttcattacaatagtttacgatttttattcccatagtttatgtgtttgtgtttgtgttttttacaattttatattttagaatgttaaacttatttatatttagaataataaacttatttatttacgttccttagaataaaattatttacgagttaaaagctatatacattgcggtttatatttgaaaacaacgaataataatggtatagataggtgataatgaataaaatagcaaaagaggaatatcagttaagaagatttatgttttttcaaacttgtctcaattaaaaaggtgaacaaaaacaggaaaggaatactctctggagttctttcaaatccacgtcttccaacaacagattgatgtgaatttaaattatgtaacaagactgttattttaatccaattgatggtgttcaaattatttaatattttttctcttatctcactgaatggtaaaggattcaaattttccacaatcggtgtatcggaaagatcattggatactaagttgtctaataattgatctacagcagctgatttcgacttataatttaggttaaaatcaagatctattttaaaagattcgacagtatcatcacctgaatcaatcccattctcagcattttgttcatcaccattttcttcctcaactaactcttctacatattcatcagggtttgaaattatattcaaaccattttcaacaatttctcttgtgacatgggaaacactaactttattcggtttcaattgttcttcttcattgtatccatcactctcttgttccttcgcgacatcattctcctcgtcttcttcatctccatttgaatcgctttcattagtatcatgttttctgctattagatgtcttacctgtggttaaaagatgtgaaagcattttccattgtttttcaacattttccttttctaagattctatttctaaaataacttttaactgttgcaaatgtacttacagataaaatgattggaaaaacacatgttgtaataagtgacataacaattagtggaaacactctaccttcgttaatattttccttgttggtttgtttatcagacttatctctaattttcgaatttttgaaatctacaactaaacattcaatgtgcttgttgttctctttaagagtacttgtaggtaaatctgtaatatatttcggatcaatattgtcccaatcattgaaaggatcatatttagttataaatgctgaatagaacccgacagttctatcgaatttagcattagctatagaaatttttgtctcaaattgttctaaacctttataatatttgaaattgggatcactcaatttgtaaattatattttcttcatcaccaactaaaaacaaatctctaccactttgacctaaaaagatactacctaaatagttcataactgttcctttataaaaggtaacacctaaatgaggagttgcaaaagttgtaaagaatcctggtttaattgatttgaagaaatctaattcatacaattcaccaacgatatatcgacagactaaaccacctaatgaataacctataaaacttatctctgtaattgaaatatcatgttcagaatgcaaattttcaatatgttgtaataaatctggcaaaatataattaccaatagcttcaacaccatcataagttttgaaatgggagaaacattgaggtgcatatgtatgtatattaaccatatttgaatcatcaaggctatgatgaataactgattccagtctagccatattttgggctgatccccataatccatgcaccaaaactatcaagtgatctcttcttttaccttcttcagccatgattatattgtaataattattctataacaaaagaaaaagaaaacagtttgccatcaaaagaaaaagacatttactatgtaacaaataaagggacaaatttgatgggtttaagattagagtggaatcagccgtctttttcaattgtcggactttatcttttatatccttaatagtgtagcggtttctttctttttatgtgattattaggtggtatactatacactacgtttataagatgacacaaacaggctgatggtattactgtaacattatatcatatcatctctcttgttgtattttaagttgatcatggaagttaccacacagatatatttaaaaaaaacattcccaattttcttagtgtaggggggatttagagaaaattttaaaatttcatgagaccacacatctcgaaatgctcagctttgaagatcaccacaacttctttggattatttacatgactgagaggcaagatggtacaaagtcaaagagcattcagctctacaggtaaagcaatattagcgggtggatatcttgttcttttccctgaatataaagcatatgtggttgcgttaagttccagaatgcatgcattaactaacgtaactgatttagaaaatcagattggtatagttaaaattaccgttgattcaccacaattcgtcaatggatcttggagttatgaagttgatttgagtgaaatagaaaatcaggggttaaattttcaattaaaggagactaatggtagacgtaacccatttgttgaggcaactattgtcactgtacttagttacgcaattggtgttgattcaatcaattctagatatgttggtaaaaatattgaaatcaaaattttttcagatgcagaatatcattccaaggatgaatcagaagagaaatcatccgctaatggagcatacaaattcttatatcattcaaaagaaattactgaagtaaataagacaggtttaggatctagtgcaggtttgattacatcattaacagcagcaatattatctaatttattttcatcatttactataaacaatgaatggaaatcaaaagttcacaatatagcacaggttgcacattgtaaagctcaaggtaaaattggttcaggatttgatgttgctagtgccacatttggttcaattgtttatcaaagatttgaagcaagtttgattaataaagtttttgaatctagtattgccggtttagttcaccttattgacaaagaaaattggaatatggtaaatgaccaatgttcattacctaagggaatcagattactgatgggtgatgttaaaggtggatcagaaacaccaaaaatggtttctaaagttatggaatggaaaaataaaaatccagaaagagcagctgaggtttggacaaagcttaataattctaatatgaaattaattgattcattgcaaaaacttgatgaattttcacaaagggaatcagataaatacgatcaattgacaaagtatgtttctaaaatgaatgcatctgaaattgcgttattaacaaaggaaaatctatattttgcacaaatttcacaatctattcaatgtatacgtgaatgtttacaaattatgaccgaagaaacgggtgcatcgattgaacctgaatcgcagactaaacttatagatagtgtttctgccattaccggagttcttggaggtgttgttccaggagctggtggatatgatgctatatgtatgttagttttttcatcagaagttgaaaatattatcaaagagacatccaaaagtgataatccaattctcggtaatgtaagatggatggatttaactgaacaaagagacggattaattgaagaaaactactccgattttaacggcttttagagttaaacttagtaaataaattttatattgaattgtaaactatttttgctaacttaagctttcgcggtaattacgtaatctcataataaaaaaaaaagggggtcgtgttacctttatagcttggcttgatctaagtaattctttaaatcagatggcaatgatctagttttgttaaagaatcttttcgttttttctttttatcattagcaatttataaaatataagtgtgtttgaattaataaagtatttaatgcaaatatgacgctgatatatacagcacagagaggagctaatacaaatttagaacggtttgatccacccctcacattagtaggatcacgtactagttcattttcaacacaatcaacttcgggaagtcttaatgattttttagatttatatgcagatgaggaaactatagatgaattacaatcaagtgatcaagcttccgacaattccgtaaatgatatcaatgagtttaacacggataaacgtgatcctcctccctcaaagttattaataaaaccggagaattcatctgtatctgaaattttgcctaaacgagaaaatccctcgacagtagtaactacggagggtatttttaacaataattcacagctatcactatcaattaaatcaccacaatcagtggataaggtagatttaaacaaaggagattctaatttactattatctgaggaagctaataatagatatctacaaactgatgaaattaaaaatacatttcaaaagtttctcagcaacactaaaaatactggattcctcaaattagagcaacaaaattctactattattgaaaaagaaaattttaagatgcaagaaaatattgggctatctgatgatattgattgtaccttaaatgaggataatattaattatatcaatactactgtacaatcatcacatgtacctaacactcatgtctacacttttgacgattcaaatgaagccctgaatattgataattctatcttagagattattgaccacttaggaaacggtttaaacgttaatgatgaatttgaactcaatatatttccagaggaaactagagatggtgatttacaacaagtattaactcgtagtggctctagacatagtatgggtaataatattgatcttttaagtcttgaaatgtcaagtgaagatgaagaatatgatgataatgaaagatttaaatcattttttgaattagattatggtttttctagtactacaacaaatgtcagagagactactagtaggattatagacacaaacaatactgaaatatatgataatgtgtccggtaatgatttaccacctaacataaattggctaccttcaactacttcacctgcaacctattctcttcattcatcaaacaatagcagagtgattacagatttagatataagtgttcagccaaatattgatatcaatgaagctcttgatgcagattctattggaactgagttatcaaataaagatttagatatagcaacacccaccgatgatccacctccatattctgaaattgatttatatcttaatacagattcacaaactaatgcacatatcacaattttttccaataatgatgaaaatcgaactttcttatcacctgtctctgaaaataatgaacctgaagctattgaaaaccaacatgataactctgatatttcaacaatttcatcctctagtaaaatgaaaaaacgtatttccattaaagtcaagaaaaatagtgatggtgaattaagtagacatgcaagtgttgattattatcaaatggaaagatttttacctccatataggtcattaattaatccaaagaaagtatatgattatagaacaaatacatatcttaacacatctgagaatcaaatagagattattaatagagttggtgccaatagtcaatcgatggtagctatacataagaagaaaagagatagcagagttgtttcaatgatactaacatcaaataatcataataatttagctgaacttctacttgactcagcaaacgataattcttccatcagatcgaaaagtatttctattagatccattgcttccaaaccaaaatataaggccactgcgaagtttcaggatttaacaaaggatatacgtcaaagaattctcagctttgttgataaccaaagagatttagtttcttgtttatacgtctccacggaatttaaggaaatagttacacccttactatacaaatatcctaaatttacatccagttatagattggcacagtttgttcacactttaatgaataatgaatcattggcattaattgttaaagttttcgatttatcaaatataacattcccagttaagttaactgaagctgagaaactgaaataccaagataaactggtttatggaactttcacagcaattgaagttctaaataataagaataagattgcagatgctggttggagagatttcaaatttaggaatcatccattatatggtgattttaacaactggagaaaacgtgcaaattcaggatcaaccatatcatccactaattcatcattagaaactttgtttgataaaagcctatcaacacccaatctgttagagacaaagaagaataaaaattcatataatagatcaagatcaaattctggttcagataatgttttcaaaaagaaaaatgttaatggtccaagacaaagatcaaattcatcagcttgtgacactaataaaaagttaccaaatgataataataataatagtgctggtagtggaggaggaggatttaaatctctcaagaaggcttttggttttgaatcaaatgtcgatgtaacaaagaaaaaacggggaagcagtccagtaagaaaacctatgttgaataaaaaggctgtatctgcaaataatctgatctccactggtaatacggttaataccattaataatagcaataagaaaaagcgtgatagcaaaggttcaagttgaaattaatgatagattaccatttagtacaacacatccaaagattaatactatgttaaaacaattttgtttccatagggatatacctgttgggtatataattcatgttttaatggcatgctcaaatcttgaagaaataaattttagtaagattattatttgtaatgattataaacttagagattatgttaattttgattggtttatgagtacaggtgttgaaatttctcattcaggtcaaccaagagatattgatgaaaataaaccaatattttggagtgatacaggacgtgaattaaatattagtgatgaatcattttttagaggttatgctgaaagtgtttcatttaaagatatttggaaatgtattgtacggttaaaaaatattaaaatattaaaactaagaaaattaaattcattagaacaaacaattattaaagattttgtaatgaatagtgaatttaaagaaactttagagattttagactgtagtgattcgggaatggttagacgagatgaatggaactatatctttaaagcagaagattggagagaatatttttcttagaatttccaattaatagtatatgggagcttaaaagttgagttgccatacatagcaactatatttagaagttttatgtttttttttcaacctagtcggaaattctttaaaaaaagtagcaaatgatgcaatttcctatagtaaataaaaagtataaatttgtaaaattaaatttgtttagaatattagtattaaatataataaatgttaaaaaataaaataaagtgaaacggttagtgtgtatgcataataacaaaattattatttaaaatacaataggttagagagcaaggctgaaatttggtaaaacgtattaaactcacgaaaccaatcaaagggtaagattcgtttatatatattttattttttgaaacttaataattggttcaaagagaactcagatttcaataacaatacaaaagcaactaacaagagaatatgccaaagacaaaacgtatactgtatcttgccaaacggtttttcccatctgttttagtgaatggatcttcaactcaaaagcaggatataacttgatacctgctatatttagataataagtcctaattgggtaaggtaattaatacccaaggtaataattttattgtacgaaaaatattttttaaaaaacgtatgcacaataggttaatttacttatttttccgctcagtaaatccggtagaaacggggaaaagggtatgtagtacgagaaaaatatagagatgtaaaatagctagaatacaaaaactttatatgaatttgtgtagaatgtaaaaatagtgatgttagttctggtacaaaccttgatagtagtgtttgtatgttggtttaacctataatttagggtcaagagtggaaaacttatacactaaaagaaattaagttacgcttgctaagaggtatagatagccgataaattcttgtaagtgatcaagttttaaaatgtaacatataagtacaataaatatacgtaattctcaaccacttggctcaatatattaatagacattatgtaaataagtgaataaactgaattaaaaaaagataatataattataaactagagtttgggcgtgtgaaaaccagccattctcgtaataaattgttgtattttcaacaatattgagaacaatacaactggaatattatgggtgattcaggcaccagtgatacttatacctctaatttcaagtgtggtaattaattatgaataggtatatatctacatcttgctgttgtatatgcataggggaaattattgataattcatagatcatacaatgacgggttaggtgtttggtttataactcaaacattaaagtataaaaacggtagttagtccacgttgatatgttactttgtttctttttactagattagatttgctttgcttttcttctactgatatataaataaacaacagaaaactcaagttataataaacgacattcagtataatgatatttaaggtaaactaaattagacgtcgaatttaaaatttggggaaaagaaattccctaatatacattgaataaagtactcttctttttttatgaaaagattaataatgtattgaacttctctcatactctacaaatacactgtgttgctggtataataaccatatatattattgaatcacgaatgatagatagatacacataaatgcatcaagtgaaaatgtgacgacagcttttactcatgttctacaatcacgctataatacagagatttgattatatcagttaaattgagagattgtagggtatgagagaagctgagacacttgttcacctgatgttagtctagtaagttcggttatcaacagtgtgtaacaggaatgtataaaaataaataaataaattaataaataaattaatctaatctaatctaatctaatcaatctaatcgtagcaaagcaaagcaaacgacgtacaaaatagaaaaaatacatggtaaatccatataataatagcagaagattctgtgcgtcaacggtgaaaaagagaatagatacattcagcgaataattccttctttcaaagtggcgttggtgggggtagtggtaatattagtgggaaactgggggattatagattatagtgaagtagtgaaagtcccgtccttccagtaattgatgtattgtgataattacacatccaaatgtagcctttattcttttctatattatattacccatcaagttcttcgtcttgaaaggtgtctttttttgctatttggctatatagttttgctttttggcttttgctttttctctcattttttacgtatacgtcgtatctcctgtcattagattattgaaattaaaataacttagtgagataaataataatattttagtacacatacatacacacaatctacatactatactctttttgatcatgccactgcagaataatcatttgggtaataatttatatctatatagtatgaacaaggggactaatactaatgtcaatggtaatggaattggcattaatggtaataatgttaataatatatcatcaataaatactccaattcatcatattgacacatttcctgtacatttgacacgctatccaatagtggatccaaatcattatcctcaatcatttacgcaacaatctcaacaacaagtttctcaacaattgtctcaacaacaacctattccacctcaacaacaacaacatcaacaacaattacaatatactcatattcctgtacctaatggtcaactacaattacaagattcttcaataactggtggttcaacttctgcacagccgcaaaacattcagcaacagcaacaatcatttcatcatcaacagcaacatttactatttcatcaacatcatccaacatacacagcataaccaacatccacataatacactaatacagatgccccatccacatcaatatcatcaatataatccgcaacaacaacaacaacaacaacaacatatattaattaataatacaattaataatgaatcaaataaaatgaatcaaaaggataataaatcaaatcctaatactattacgaatacgagtacgaataagaaggttgatttgaagaaatcaaatgaaattcaaactcctgaaaatttagtatctactgagagtatatgggaacaatatctgcataataatatattgccttcaaataaaaataattccaatatcaatcataataataacaataacaataataataatgttaataattcaaattctagtaataataatagtagtagtaagaaaagaaaatcgatatccaaaccaactaatacaaataataaaaaagtcaagcggaaagcaaaatctggaagttttgataatattataataataagtgagcaaacgacaccagaggttgaaaaggtaacggaaaaggaaatagatacaaatgttgaattggagacacaagtggatataaataaagaacaaccaaaggaatctccaacaacaccaccaaaactaacattaattttgaaacctcaaaaaatacctgatattttaaacaatactccttttgagaatagaactaaaatttcaaactattttaaatccatcttcaccaattgaaccaaaagaagataatacacaattaaatgatactcaaaagaatgataataaaaatcatgatactttagaattgattgtaagtaatattgatgaaaacgttaatgaaacatctgaacaagttgatgaaattaaacaaatcaaaaaggaaatatctgaatctaatgaaaagaagcaatcagaagatgataaagtaatggaaattcaaatagatcaagataatactgaatttaataatcataaaaaaacagagcatattgaaattttggaggatgatattcaagaattcaataatgataatttagaaattacggagaaaattataagtttcaaaattgacaaacaaaaactgagaaagatattaaaatcaaatgatgaatccaataataaacaatctaagaaaaagaaatcatcccccaagcctgaaaagaaatctaaatcaccaactaagcaaaaatcacagaaattatcaataactcctgaaccatcaataaacgtagaaaatcaaatagtcgaatataaaccaattgaatcatcaaatttagttgtacttaatgaacaacaaaaaaatgatatatttaatcataatgaagatgggttatatgaggaagaagttaataaattatgtaatttaaatttaaatcaattacctgaaggttatattccattgattatgacacctaatggtatgatcataccagttgatgtattaaagaaacgtggattgattgtcaaaaaagaggaaaacagagcaatggaagtagtaccagaactaactaaaggtgaaattactaaaattactgattcaaagccacatagtgaagaggaaatggttgaaccattagaagttttagattttgataaattcgatcaatgtgctgcactttcgttatatttactgagtaaagaatctaaacttgacattaaatatgataattatgaatttgatgagaatgataaagaacataaagaatggcatttactttatcaaagattacttcaacttgaaaaattaaaatttattcaaagttataaagatgaacgtaataaattagtcgatgatgctagctaaattaaagggtgaagaaacagtgggaaatgatgataagtttaagaagtaaggataaattacttgaatttgagaaagatttaatggagatgagagattatgaaattttaagggccaaattaatgcatgaatataatgagaaaagtatttatttacaatatttaaataatgtttcagaaattgaaagtatgggatgtttagattatgctgttagattaacaaaatataaaaattatttaaatatggagaaagaaagactaattcgtaatgaagagaagattgctaagatcaatacagttaaaagtcaaggtatttggaataaatatattcaaagtgttgccaataatccaaataatgataatgtaattgaaattcaagatgaaattgagactcctgtgattaagaatagaagtagaggtagaaataaagctagaagtagaggtaaaagtgttaataataattttaattataataatatcaatgatagtagtattgaattaatatcagagaaagattttattttattaaccaatgcaaattctagatcatatagtacatacgttttaaacaattcattatatagtaataatgaaggacaaagagagataattgagttagttgaatattatttaccagataagagtgttttaagggaattatttaaagaagttaaaagaaatgatcaaagtaaattaaagggaattaatgataataagaataaaaggttattatcaattaatagtgataaaggtaatggtatgattagtacatatggattaaaggagagtaatgttggatcaagtaatagaattttaaaagaattgcaaattgatggtatgaatgttgatattaatgataatgatagatttgagagaagaggagttggtacacgtaaatcaagaaattctaatattttcacagaggatgaaatattgggtaatacagaaacaggagatggtggcatttccaataatgataataataataatacagatagagatagagaatattacattgataattacaataaaaataataataataataataataataataataataataataataataatgggcatggaaataataatagatatatgaggagatgtaatgttacaaatttaagtagtagtgatgagagtaagaatgaagaaggtagtgaagttagtaaagaggttaataataaaaatgataattcagataatgttaaacgtgaattaaatattacgagttgtttagatacttcattatgtgatattgatagagttaaaatgttaaatttaaatagggatgaaattaatttgcaatatacaagaacatacgcaatgccacatgggttgcattgggaagaaattaatgaagatttattatatttacgtgaaatgaacgataaaaagaagaatagtaaaaggaaataaagtgtgttatatcttgtgtattattaaataattcaataataattaaaatagatcgtattacgtaatacagtaattataaattattagaccttcccaattaggaaataacgaaatagcgaaatgaagaagttacccggagaatgggaagggggggttattcttacagtaggggggtttctctgatgttaatagagtatagtgaagtgtagtatactattagtgtagtataccagtagtagtgtgataccaatacctattaataataccaataataataaaacaccatcagatactgccaaaatacctaccaataacaataacaataatagccccatagtaaataaaacccaatttttactaacaaacaaaaaaattttttccaattttccaattttccacgtcgtcgaaaaaaattgtaattttttttcctcttttcaccaatcgtccacttgttaaatggattgaattttttcaacatttttttttttatttattatgttacttttactttctacttttcactttttgcttttaacttttcattatattctttgatttttcttaattaatcaaaagtaattagtaattaataaaaatggctgaagaagaacacaatttcgaagttgcagatgcaggttcctcattaacttacccaatgcaatgttccgctttaagaaagaacggtttcgttgttattaaaggtagaccatgtaaaattattgatatgtcaacttctaaaactggtaagcatggtcatgcaaaggttcatttagttgcaactgatattttcacccaaaagaaattagaagatttatctccatctacccataatatggaagttccagttgttaaaagaaatgaattccaattattagatattgatgatggttacttatcattaatgaataatgatggtgatatgaaagaagatgttagagcaccagaaggtgaattaggtgataaattacaatccgattttgatgatggtaaagaattagttgttactattgtctctgcaatgggtgaagaagcttgtatctcattcaaggaagctccaaaatctgattaaattatttataattaaatttaatgttatataatataaactaaaataaaattataatatataaaaatttttaataatataattcaaagcattttactacattaacattaattttactacattaaatattaaatatttattaattcaccatttataaacatttcatcaagtattgtttccattttgtaaaaattaaatattaaatcaagttcacttacattattaaaatgttcatctaataatttaacataaattggaattgagtttaaatacattaattgattatcatcatcatcatcatttatacaaattataaaattcaatccattatattttttgtaaattaacttacaattatcaataaattcaatacaattatgatttgaattattttgattaaacttattattattattgattgttttataaactaatttaattatttcatcttcttcattgattttataatttgtataaaatttacttagacgtactttaccttgtttattcaaacatagtataaatttaactcccattgtgttattataataaggttaattagatatatctactaatttactaagcttactgtcatgtataagatgatatcaagggatggttgacattttcaatccgtcgatcgacttttacaatagaatagcttcagattaggtgtatataatgatcattgattcataattacatgtaaacatatcaattactgatcgtatagtatatcacccataataaacgtgtatttctacgacgtataataatattaatactctaaacccacacagaacagatccccttaaacaagtaaccaacctacaggaaactcgtaaactgtaaattaacaataggaaacacgataaaaaaactgaaaaaattttatttttattttttttttttgatattttgatatattttgatatttttcagttttcttttgaaattcttgtttctttttctggatttataagtgtatagtattctatttgtattgtcgtcttcttatagatcaatgtctgcagcatttgaagaattgagtaaatacaaaggattctaaattaaattataataataataaacatactaataagcttcccattaaagacataaatacaactgataaatcatcaaattcaattgatcaatcaaataataaaaggaaaaaagttaatccattcattgaaaatttaattaaaaatccaattgttttcaaatctgctaaaatacctgataaagtaactataaaaccttcaagttataaagttttcaaatcttctaaaaattctaaaaataaggatagaaaggaaataaaagaaggaactaatagtgacacaattgttaaagagaaaaaaattgttagaccaaaatcacttgctgaagctattgcaaaatattcaaataaacctcaaacaactgaagagagtaatattataaataataatatgaataaaaataagagtaaagataagaaatctaaaattgattccaaggaaagattaaagttgttattattaaaacaatcacaaagtaataatactaatattgatactgaagatcaaggagagagtaaaagtgaggaacaaacacctgatcaagaagatgcagtaagtaatgcagaagatgacgatgaggatgaagatgacgatgatgaagatttccatactgctgaaagtgaaggaccatctgatgaagattatgtagaagatatttcagaaaaggataatgaatcagacgaagaagaagaacttgctgataatgacgaagaggatgatggagatgatgatttagaaactttaaagaaagatcttaaagatgatataatagaaaacgacgaagaacaagctttaaacgttgaaactccaccaacttcaaatgatgatgattccactactactaacaatacaagtaaagatcaactgattgataataattatccaattgaagatttttatgatataaatgaattaaaagttgatcatggttcaaataattcgaaaagaattaataaaagttggggttatttagttgataatactgttccagttggtttaattaatcatggtgttacatgttatatgaatgcagctgttcaatcaatgtcacatatagcttcattaactcattatttaattgatgttcataatggtaaatataataatgaaattaaagataattcagttacaaaaattttagcttcaacaatttcaaaactttataaattagaaaataaaaaatattcttatattaatccaaagagattaattaaaagattagaagatattaattgtatgatgtcagaatggcaacaagaagattctcatgaatattttatgtcattaatgtcaagattacaagaagattcaactccaaagggtgttaaattaaataaaagtataatttatgatatttttggtggtttattagatcaaactgttacatgtacaaattgtggtcatatatcaacaactcaacaagaattttatgatttatcattaggtttagataatagaaagaaaagatcaagtttaatgagtgatgcaaatcaattatttcaattaaaggatcaaattgaacaatgtaattcatcaaatgaaaatgaaaaaactcaattatcaaaaattttacaacaaagaattttattagccaaaggtgttataaataatgaaattaatgaaaatgatacattaaataatgatattaataatgaatctaatgataatgaaaatgatacagtaaataacaataataatgaaaataataatgatatacgatctaaaaacacagaaacatcatcaaataataataataccagtaataataataataatagtaacaataataataatgaacaatcagttttaaggagatacattttagaaaactcaataagagattttttttcacctgaaattattaaaactgataaaagtgatcaaacaggatatacatgtgaaaaatgtaaaaagcaatgtaacgcaattaaaatttcaacaattcaaagatcacctgaaactttatcaattcatttaaaaagatttagatttaatggacaacaatcacaaaaagttaaagcaagtgttagttatcctgaaatacttgatttaacgagttattcaacagatatttcaactccaattaaatataaattatcaagtgttatagttcatcaaggtagatcagtttcttcaggtcattatattgcacattgtagacaaccaaatggtacttgggcaacatatgatgatgaatatgttaataaaattccaagagctagtgcattgtctgatcctggtgtttatgttttattttatgaaagattaacttataaaggaactcataatgaaaatcaaaatgagaaagaaattgaaaatgtatctgcaactgcaacaactagtccaaaagttgttaaatcaaagaaaagaactagggatattaataccaataagaataaaaagggtaaaagtttcaaaaataaaagaagaaaataatttatacaataattttttcctgtttatatttttatcattgtatattagtttataatttttttatttatttacaagttttatttatttataaatgtattactactactatgtatgtaagaaaagaatggaaaacaatttctatatattattagtttaaacgacaacttcaatacctaaagttttagcagtactaataacacttttacaaatatcctttaatggaatttcagcatgagtttcatcagatttcttaattttagcaacttcataaacatgtttcagtgaaattgtacctaaataaccttgctttgcaaatttacccttacctaaagtatcactacctttttctttatttattaattgtaataataaccacgacgtagtgggacttttagttgtaaatgaaaatgatctatctggtctaacagttaatttaactggaattggtacatcaacaacatattgagctgtacgtgcattaaattctttacaaaaatcaattgctttaacaccttttgaacctaaagctggaccaactggtggtgttggtgctgccttacctgcaccaacaacaagtttcacagtgacgtcctttaattgtcttgacattattgattgattataatattaaaaagaatttggtgatgatgattcaaagattcaccaagaattcatgaagttagaatggaagaaaaaattcataaaatctgtggaaactgaaaagtcgcgactgtaaagttttatatcttaatatctacactataccttgctcatagcaattcatctctattaattttgtaatatataagttaaattaagttaaatgtacataaaaaagaagtagtttgagaaatataataaataaataagatgaattgaataatagtaatagtaatgatttaaaatttcctttccaaatgtatccagcatagaaatgaattgtaaatataagaatagatttattttattttttagcagtaccatttttccgtttaattctttcaaatgatgcaatatgagcaacactttgatcaacttgcgtatgttcatgatcatttgcaggtattaatttaccatgatttgattgttcaccattttcatcaatcattgtacacatttgaatattacttaaccatggatctaaaaagcatgattcaatatcaattctacatgcaggtgctaatctaaccattttactaattaatggtctaacttcattacttaatgcacctaataatctatcttcacctaataaattggatgtatgtttagcttcaccggttgaatctttacctggtgttgacgatgtagtggtactttctttggaatcaacaatatcatcaacttttgcttcaattatttcttcattttcattttcttcattttcttctaaaatatcatcttcctttaagttataacttggtggttcgggtaatcttttcaataattcaccaaatgtaacaccaggttctcttgatgcaaatgctttaaaacttgcatcacttaattttggaattttccatggaaattttttcaaaaccatacaacaataaataattgcaactgaccaaatatctacaggtcttggatcataagtattgaaaacacaaacttctggtgctaaataaggatctgatccaacaataccagttgcttcaattaaattattggaaaatggatattgataaacaactgctgaaccaaaatcgataattttaacaataccatgtttattaataacacaattatctaattttaaatcacgatgtgctaaaccaattgaatgaatgtattttaaaccatttaaaatttgtttaaaacaacaatcaatttcttcaatacccattttatttgacattacaattgcaaataaatcataatcacaatattccataacttgaactaatctatcattttcaaaactaatttcaattgtttcaataacatttggatgttttagtgttgaaccaatacaatattcacttgtaattttctttgtataatcttttttactctcagttgtaaactttgctctaaattctttaactgcgaaaacttttgaatcgcttaatcttcttaataatttaacttgaccacctgcacctgcaccctaaactttcaccaaatttaacatatcttttactaaatggaattgatgatgtattaccaccaattgataaattattaagtgttgttgaagatgatgcagatgttgataaattatttgatgtactattattagtatcataacgacgaaattcatgtggtgatgaaccttcgccataaattgatgttgaacttgggctatcaacaaatctattattcaaattggatgaatttttcaaactaaaatttgaatttggtgtatttaataaatttgaactatcagtatgtaaattggtatttggattaatcgtaattgcagatgggggaatttgaattggattatatgtagttggcgttgttgcagttgaataagaattagtagttgaaaatggacttttacttacactaatattaattgaattactattagaatgacttgatggactttcattaatgttattgttggtatttgaattgaatggattattggaagaattgttgttattgttattggtattattatttccattaggtgtagtaccagtattatttctttgagaacttaaacctgcacttaatttagaaactcttggagatgatgagtaaatattatttggagtaccagatattgaacctgatcttttaaagaatcttcttaaatcagccattgatgaatgtcttgttgatgtcgaggagttgaaactttcggaacttgattgagaagttggagaatgtaaatcatgttgaggaattgaagttgagaaattattatttgataatgaacttgaataagtatttggagatggtggtaaattatcaaaattggaagcagttgatcttcttgattttgaaaagaaatttgctaatgaagaagaagacttgtttgaattactattgttattattgatattactactaccgttcatactatagttatttaaacttgaattagtagtttttaaagatgaagataaagttctagcttcaattttttgttttgaaacaacgaatcttgaatctatttgatgagatgcaacagttggagaggataattgattaccagtaataaattgaccattaattggcattgttaaatttgtgaatgaagatgaaatatttaaacctgacttgagaaggtttatgattacctggagctgcataaggtatacttgaagataattgagtgaaagaatgggaagcagaagttgaaactgaattggagatagaatttgaattcgaatgggaatggctgttactcttatttgaaattacgggtattgcagttgatggtctatcttttaaaatttgatttttattattagtagaagcagaagtgttatcggtagtaatatcatcgtgaatatgtatagttgatttatttaaaccagacattgaatttgatgatgaagggagactattatctaaattggtatttgttgaaagttttgaaagtttacctgataatttaattgcggcatttgcagcatttgaagcaatcgatgattgatttttcaaatgactattattatcagtatcatcatccggtgaagtaccaacagatacagcagttgtgattgtaccattatatgaagaatgcataatagttggagatgaagggggtgttgaagatctttgcctttctctatcttgatgtattaatttagtcaaagatgactgagctgtcctttcagtcataattgtaaaatgtgtgaactatttaatataacgtatacgtaatgagataacagtataataaattagacttaaattgtaaatatagaataaaaagtgttatatacagattaaataaagaatagaacaaaagtggaagataaatcaagaataataccaatatacgaaaacggtctctgtaataaaaagaaggaatttcaagcttttccaccataattcgcgtctctcattggtcccgataagataacagagacctttttcggaatttgtactgtacctctttttgataactatctccacctctgcatcagtacttgcttctcttcctgttgttgttaccgttattatcgtagtaattacgtcttagacgtcgtgtctgttgattggagttactgctgctgctgttattagtactcccagttgccggtggtggcggcggtggtggtaacggaggtggcggtgcacttcttcttggaggaggttttgcggctgatgatgaagtggtagcagaagtagtagtagtcgtggatggtgatgatgatgatgaatgttgactggatctttgattgtaataggaattgttctggtattgaccttgaccttgactttgacgttgacgtgatgatgtagttattgttattattgttgtagtgattttgactatggttttgattgtaattgttgtaattgttgtaattatcatatttattgtaactacttgtagtattatgttgatattggtttttttgactttgattgtgattgtgattttgattttgatttccataccttgtatgtgatgatggaccattcggaatagattcagatttaactggagttctaggtgagcttctattggaagattcttgtttaactctttcaacttctttctccaatttattcttctcctttacatcatccttttcaatattatgtaattcttgtatcttttcaacttcctctttgacttgttcatcaattagaatatcttgaacatttacgtcttcattgagactttcaatatcttcgatatttgcaatactttcattattgttgatactttcaatatcattggattcattattttcaacttcatcaataacactttcagctcctgtatcttcagttttagtctcttcttcatcaatttccatttcatcaccttcttcattttctggaacttcatttttaacttcacctttttcttcatcaatatcgttggattcttctttgaattccccatttgattcatctttgatgtcttcactgactgtaacatcttcaaccttctgatcatctccaacatcaggcatgacagcgtcatcctttgtatcattaacttcatcttcagttttttgttcaactttttcttcaactttctcctcactattctcttcaactttctcttcaactttcttaactctactctttaacccaactaatccataaggtttagctacaggtttattaactaactctctctctttctctaattgcctttcattttctttttcttcatcttctttagctttcaaaattgcattcttttcatctcttttcttaatagcttctaatttatcttcttctttcatttcataaaattcccaaattggtacatatttactatcttgaaatttaattaatccaattaatgccctacttgataatttgatatcttctctatcatcattttcaataatttcattcaagtttatcatacaaaatttcactgtgttctttgattactggataattattcattataactttcaaaaatgaaattatattatttaaacttgtatagcttttagaatttaatgttttgataatttgatttaataataatacttgccaattaaaataaatcttctttaaattccttgtaattttcaaaatttttgttttccttattgaaaatttcttcatcactccaccaattatttaatctctctaatactatttgataaaataatgctaaattttcagtttcaattgttgtatttgtaaataatgtgattggtaataattcagtattgaataataagtttaacacattcttcaatgaataatttttaacattaacaacggaattaataaagaataaaaatttaccgacgaaaattgcatcaaatgatgattgttgaaatcttggaatgatacatttctcaaaaatatgtaataattcttcctcatcaccattattaaaccatttatccttctcgttttcaattttatctaagattttattataattagtttcatgagtttctttatcaattttaatatatttaacaattgaatttaatttactatattgatcttctaatgatttgaatttctttttcatttaaatcttccacgcgtcttaattttaattgaactcccttaatttgtaaatttaaatcttcttcctctgtactatatgaaatatcattaaaatcaatatcatatagtgataatgtccaaaaaattgaaaaaaattcaacattcattttctcaaagtcaacttttccctgaaatgtttcccttattggtgtataaatatctgaatcataaaatttaactaataagttttttctccatatttcaaaaacccattgaatttcaatattaaacctattgactaattcattaactgagtaaattctttcttcaaatcatcacttttcaaattcattataattataataattaaattatgaattaaggaattgatatcatcgattctttcattgataaatttcaaaggtttttcatcttcaatttcaattaatttataattcatttggcataaaattataattaattcatttaataaattattttcaattaatgttttcaataatttatttgaacttctaaaattatattctctattatcattaattgcaaaataaactaattctcttaaactttgacccgaatttaatcttaaaatttgtttaattgttaaattattatttgatttaatacctgtcattgaatcaattaattcctttaaaatgtaaattatattgaaatcattgatcattaaattattatcaataaattttaaaattggtgataattgaaatgattcagtatataatttacttaatttaccaattaattgacaaatattaacataccactgagaataatttataccatcattttgaattttatttttatttgatgataatttatttaagatctgataagtaattacatcccatgaataatcattgaaaaactttgatgattcacaaattaattcaattaaactattataactttcaatatttgttaaaattgtaaatgatgaacacattggattaattgaaacaattttatttaatgatctacatgaaatattaatattttcaattgacatccttttcaatatatttttagttttcttttcgaccatttgataattataatttaaatataaatcctttttatagtttttcatataatcatcatataatgaataacgtaattcaatcgaataattatttttgataatatcaaaagtttcattaattaatggtatgttattagtaaatagtaaacttggaaaaatatgtaattgaataatttcaaaccaaaaatcggcgtctttgatgttttctttcaatgatttatccataattctaacaattttagtcattaatgtattattttccgatattttatgttttataaatggtaagaatttaatgagaatatctaggtattcatctatattcatattggatttatttgattgttcattcaagcccgttatatcaagattatcaacaaaagaataataaaattcatcaattaattcctctaataatttatttaatttatgtaatataatatttgataataatggtatttcagggaattctgacaagataataaagatataatccaataatttataatctattaaatattctaggagatcaaatttccaataacttttgaatttttcatcaattgaaagttcaataatttcatcaacttgtttattaattactgattttgaattatttgaatcattttcatcatctgaatctggtagtaatggtgcagccatggctaaagctgaaagacttttaaaacctgatgcatttttcagatttgtttgtttctcttctaacaattttgcaacttcattataatcataaggttttaaacactcataaattgaatcaaaatctaaaatattttctttgattagataggtaactaattttaattcaatacatttatcagatcccatataattagttaaataattaataattgttgattgagttgaactatttaaatctttaggtctccaccaaattgtatttttaaatatttcaattaccaaatttggtaatttatcaaaatattgtgataataaatttaataaaataaggaaacatcttttattatctaaatcaaattcaaaaactattttcatcaaaagatcaattaaattattgatattttcaaaatcatcattttggttattcatatatgataaaattgcagatatgaattttgaataaccttcacttgattcatgtaatgaagaataagaatcaattgagaagacacgatttctagcatcattatattgatatttactaaaatctgggaagataccttcacttttcaataaatttctattcaaatataatattttaaatttattatcaattgtacaatcttttataaattttttaatattttcattgtcattattaaatgaagataataagattattaaattttcattaattttatctaatttttcagatgaaaaattcaaagacgataaaatttccgaagataaattaataaataatgaacaagaggcacgatttggatattcactaattgaaatgaaaatttcatagaaaacttttaaaatatcaacttcatttgatttcagtttttcaattaattgtaatttaagagtatttgcattaagtaagaaagaatctgttataaattcccaatcatatgaagcttttatttttggattgatagattcaattggagccgttacctctgtaaagccgggtataccttccattagatataagatggatttctatatcccaaaaggacctaacttcagaagaagattgtgctgagcgttgggcaaagatttctgaagatgcgttattgacatgtaaaaatttcacttcgctattaaggttagtattttctatgaatctctttcttttgacaaaggatgcaaagtggcaataacagcagagagaaacaagtttacaataatttaaagaataaatatattggtattggagatgcagatacaaagaggggagaatttttaagtaatattaagaaagatacatattttagtttgattagttatgattcaataaatacacatttaagtattgggttaaataaaccaaaacaacttatacaaaatgatataattgataaaatgagaaaatgttagataataaaagtaagataaaataaggataaataattaaataattaaataatcaattaagctaatagaggagcttgatcatttgaaattgcattattattattattattttcaacttgtcttagagcagtattaaacattgataaaattgaaaatactaaatttaaacctgcgataataaaggcgaaaatccattgtaaagcaaacattttgataaacatttgacctaaaccaacacctaacattaagaaacttgttgctaaaccaacagaccaatcagaatagaaaattaataatgacattggtacaagtaagaattcccaaatgaaaatatttgctaatattctaggtaataaagatttattatgagaatgaaataaacaagcaccattccaaaaaatagcatataaagtccaagataatggtataccagtaacaggtaaatgaatagttaaccaatcaggtaatgatttaattgaaattgttttatgagagaaatataatgttaataaattaagtaaattaataaataataaaatttcagcaattataaatttttcagctgtaaagaaataaatccaaaagaaattaattatatttgaaattgtaaaatgaggaccaacaattgcaattacatttgattgatttgaatttgaaacatttgaattaaataggacttttgttataaataaaaattgtaataataaagtaattaaccaaaaaattgttgttgtaaataaagtaccagagaatggagttacaaaatgtttatcattttgatgaggtaaaagccaaaatatggttgcaattgcagaaattgcaaatgatgcagtaattgtaatttttgaagctgttaaacctgatgacattatttaatggaaatacttataaaaagaagaggtattttaagaaaataataattaagaataaagagtaataataatcatgataatatatattttatataaccagtccacttatcattgatctgatattgatattgtttatgatggttatatgttaaatggattatagtccttacctgtcccatgtgtctgaagtccctattctaaaataataaaattttgaatgtctatcacgtgaaattatgtaatttaaacgatcaacaagtactacactacatatcatatcatatacatatcatatcataccttatcttatcggtgtagtacattctatatatcaaagtttatactctatactctatactctatactctataactttactctaatatactctactaaacttatatccgttactatgttaatacactatagataagataagataagataagataagagattacgtaacactcttctggaatattctagtagtctattaagtaatatcggatatcggatatagtaatatccgatattaatagtatcggatttaaatttaaatttaaattttttaagggttttaaagttatttccatctgaaaattcggactttaacctattaataatctaaacgatgagtaattaaatttttcttttagagattacaaatatacttttttaagttataaatactgatctatttcctattacctcgtataactttattattctcttctcctctattctctattctattctattatcaaaaaacaaatgagagctttaagaaataccactaatataagaaaagatttattacaatgtgttaattgtacaaataatattaaccctgattataatgatgatcgtatatttaataaaattatacgaaataatgataataactctaacacaaattcttatatactacattataataacttatctcaagcaaatatcgatagaatgaaaaattatttaggtagaactccttcaatgaataatacttttcattttatcagatagatatacatattactactagctcatatcacctatactaaaaaaaaattacaaaactaatactggattattagtatttattatacaaacatacatacatccttaattaaggactaatactaaggcatatgtcggttcattttgaaacttgctcgtttaatggcattatgtacaagatattattgtgaaagataaataaataaataaaaaatagtatacaattataacataataataataagaataataataatactatattagaaatagaaaaaaaaaatgtgtggttttataacatattggaatattgtatattgtataatgcagatatttataatataattaactaactaatatattaatataattaactaaattaatcctttttttcaactttttcttcagttgattcttcttcaatttttggaatttcaatttctccatgattattcatccaatctttaaatgatcctaaataatttaatctattttcataaccaaatgtaccagctaattcttcactcattgttgatctaacacctgcaagacaataaaatattaatgttttatcagtacttggtttatcaaatccaaatgacagtttaaattcatcaggatgtaaacctaatgctcctggacttgatttacatggaatattaattgcatttggtatatgaccctgcattaaattcatcattctctctaacatcaactataacatatttatttgaatcaaaatttttaacaatttcattcattttgataaaatcaataattggtgcattagattcgttttcaataactgaatattgtctcttgttattaataatttgatttggaattgataattttgtagttttaattgatgataataatgataatctattagttttaattaaattacgtgataagatagaaaatgaacgtgcaattggtgcagttctaataaactttaatggtgctcttaatgacattggtgttgttaatatttataatttataaatcaagagataaataaacaccttttgccacccttagtgttaaaatattaattgttaattttaaaagctccatcatttttcaaaaataaaatttttcttgtcgctcgtatttattattattatgatctcataatattatcaattttcactaattatactttatatcactaaatcaaataaaattattattaacttaaaaatgttatacttattattattataattataattataaactatatatatactatatttacataccaaactgttttctcatttgatctgccatttgtctaaatgatggattttgcatcattttttgcatgtcttgcattgatggcataccacccataccacccatacctggcataccacccattcctggcattccacccataccacccatcatcttttgaatattttccatcatatcaggattttgttgcatttgttgcattgccttttgaaattgtggttgttgcattttatctgccataccaggtggtaaatttgattgcatatttttagttgtttgtgccattcttgcaaacatatttctttgtaataaaactgcttcaacttcagttacagttgtacctgaacctcttgcaactctaataattctacttggttcatcaataaatatactaccatcactctctaattcctttttagtcattgaatccattatacaaatcattctcttaaatctatttgatgtttcctcttctccaacttgattcatcatttctccaataccacctggtaacatttgtgctattttacttaatggtcccatctttaatatattattcatttgtgattgtaaatcttttaatgtaaatttaccttcttggaaattcttcatactatctccttgatctaaatttaaagttttaacatgttccattaatccttgaatatctccaatacctaataatttacttataaattgttttgctgtaaaactttctaaatcattaatatgttcacctgtaccaatgaaaataattggtgtattacttgatgcaactgctgatatagctccaccaccttttgcatgaccatccattttagttaaaattattgcaccaaaattacttgattctttaaatgcttttgcttgtgcttccgctgcttgaccaatagatgcatctaataccataattgtttgatttggtttaacaacttcaccaatttcaaccatttctttaaataattcttcctcttgtctatgtctacctgatgtatcaactataataatttcaaatttttccttcttaaatttttcaacaccctcttgtgcaactttaactggatcactctcagtatatgaaccaaaatatggtattctagcctttgttgcattttgctttaattgatcaaatgcaccagctctgaaagtatccgcacaaaccataccaactttaaatcctcttctttgataataaactgctaatttagtacatgttgttgtcttacctgaaccttgtaaaccaacaaacataataacatttgattgttttttacgtggtttgaaaatttcgacatttttaacatcaattaaatcacataattcatcgaaaactgccttttgaattagtttctttctattggttatattatcactttctttaacttctaatgttgcctttaatttctttcttaatttcaaaactaatttgatatcaacatcactctccattaacgcatttgaaatttcctttaataatgtatcaactacactttgtgtaactgttgatgatttagtagcctcagagacggcattgttaatacgtctacccaaatctgctaaaaccatccttactttgccaaaagaagaaataaaagttccatacttaatatcccaccagaacacacaatcatgaaaattcaacgtaacttatcaccatcaccaaaaaaatagcatttttctatatccgtccaatcgtcgctttagtaaatggtacattatccactgtatgaacactctttacccatgtctgtaaggataatacaaccaccatcaattgtggaattctgtatatttaatcctcaatggattgatcaaaggaaagcggaagattcaagttctttaattcaacaagttatttgtcatttaaccaaaaatgaatcaggtgaattagttagtgatattaatgataatgttgatgaaattgtaaatgcaattggtgtcattactgcaatttacaatatttcaaatcaattgaaaagtggtaatgatgataatattgattatacatttatagatactgataagtcaagaactattgttgttctattaaataataattattattatttcattaaatttcaatttgctattaaatctgttgatgacaattctgataatcatgaatatacatcaattggattagcatctgatgaatatttgaaaaaaatgttattggatgcttatgatttatttacacttaatcatggtgagtttgatattgatctaacaaatgttaatgataaaaataatttaagacaattaacaactcaatggtggaaaatttggttaactaataaatttgagataccgtcatattttgatttatctgatgatggtaactttaaattgatcaatgcattacgttattcatctgtaaggaaacctgttggatttactgataatattgatttaaaatttcaaaatactatttcggagaatgaatttcttgatgatataattgtgataaatactaattggtctccagagaaaagttggggagtaatatataataatattgaacgttccaaatacaaaaagtcaagtatattcaagttaattacaatgtttaaaaattttgatatgtcattaggtttaagtacttatgcattaacatttggtaattggccatcgctattaaaatacattgattcattaagaaggtttgattcaattaaacctgatggatcattgattgaaagatctattttcaatccaagctattcattgattaataatgtttataatccatttgaaggattaaatgaaactattaattcatatttaccaacagtttcaactttccaaaatatgacaagttatgttaaaccatcattattgactgtttctgatataacattgcatccatggaatactgttacatcatactggaaaaaagatagtgagaatattgttaatggagaaaatacaccagttgaagagaataattcacaacatcataatggtggtattaatttggttaatgaagatagtgatgatagtagttgtgatgataatggtaaatacaatagaaagggtgcttatctattgggtgataataatggaaccattacattacatgattattatttacaatctaaatctactaataaatatgaaaaaatgaatcctataatttatgaaatcaatggtatgttattcatctatatctataaaccaacagatcaacttatcacaggaatcattttatgataaattatcaaaacaaatagattccatatatgatacatattttgcagatttaataaataatcaacttgtttcaataaagaaagatttaacaactgattttacatatttaatatacgatgatggtaaatattggagttccatcgatacaattccaccagatacgtctacattaatatatcagttaccgatgagtagatacattagagaggaacaaaatatatcagttctggagactacacgtatattatcattgattcaaaataaacgtataggagatttactattatcaaataatgatgaaaataatgaaatttatgaaaaagtagtcaaactaaatcaagaacaatggtgtatgatacgtcgatacaatgctaagaaatgggattttactaatacgtaattccaaacctggagatattgatatattcggtggtgatgtagctaaatggcttgaatgggtagcaaacgatggttaccttaattaagggagaacgcggtttaagaacattaatttcttttctgttaggtagttttagttaaggaatttattttttttaataacccattttaaagggtgtttattcctttttgatacagtgtaaataattgtataatatagacaacaaacaaataatacaaatatggcagctggactagtatgtaaacaatgtgggggtactacattctcaagagagtttcatactgcgtcaggagatttagcatgtacgagttgtggtacagttatggaagaaaatccaattgtttcagaagttacatttgcagagaatgcagcaggtgcagcaacagttcaaggttcatatgttagtaatgatcagagtcatgcaacttttggtaatggtagaggttcattagaatcaagggaacaaactattcaaaatggtaaacgtagaattcgtaatgttgcattatcattaaatatacctgatcatgtatctgatagtgctcatcaatggtttaaattagctttaacaaataattttgttcaaggtagaagaagtcaaaatgttattgctgcatgtttatatattgcatgtagaaaatataacactcatcatatgttaatagatttttcatcaagattacaagttagtgtatttgcaattggtgcaacatttcttaaaatggttaaagcattacatataactgatttaccattagttgatccatcattatttatacaacattttgcagaaaaattagattttggtaaaaagacacgtaaagttgttgaagatgcaaaaaaattagctagaagaatgtcaaatgattggattcatgaaggtagaagacctgcaagtattgcaggtgcatgtttattattagcagctagaatgaataattttaggagaacacacttagaaattgttgcagttacacatattagttcacaaactttagagaatagaattagagaatttaaaaagacaaaatcatcaaatttaacaattaatgaattaagatctaataaagaagttgaaaatgttttaccgccaagttatcagaaaggtttagttaaatcacaaaaagttttaaatgaattaaatgaattagataatgttgaagataaaatgattaatgatccagttttaggtgcattattagaggatagtgaaattaatgaagatgaaattcaaagtataattaaaaaattaatgagtagaaagaagagtgaattagtgaggaatgttaatcaaaaagttatttatcaagatggtataaataagttagagattgataataatgatgatttaaatttagaatcatttaagatggaaaataatttaaaattaaattatgaaacattgaatgatacaagagatttagttcaacaaaaggatagtgaattgttgaaaatgattgaaaggaataaaccaagaaatttatcagtttcattaccaactactgaagaaattttgaaaaaaatacctgatgatgatgatgaattaaataaattaattgatgatgaagaattagatatgtttatattaagtaaggaagaaagtgaaatgaaggaaagattatgggttggatcaaatcaagatttcttacttgaacaagaacagaaaagacttaaacttgaaagtgataaaattgcaggacatacaacacaaacacgtaaacgtcgaaagagaggtgagactgaaaataatgaagataataatttaccagttggtggaggtttggctaatttaatgagagcaacattaagtggtaattcaactgcaactgataatgctaaagctttattaaatagtaaaacattgagtaaaaagattaattataatgcagttaataatttatttgatgattaaaggaaaatcaatagctattaaaactgaagtgaaatatgtatgttataaaaaattgtatagtaataataataaatagttgaaaataaaacgaagaaaaaaagtttcttctataaaggtcttccatttgaaccaactctacctaaaccattacattgagagcaacgttctaaatctaagaagaaatgaactaaaccacgacctttacaacgagggacataaaacaccaccaattcttggatcaccgggattaacaaccactggagcttgttgtatttgttgagggaatggattataaggtatagttgctcttgcaccctctggtaatttaacaacatttgaacgtattggtataggttttggtttatgagttgctaaatattctaattctttctgatttttaggtggatttttattttgaggacggaattttttccaacatgatttacaatatgtaccatcttttttcctaaatcccgtattttcacattttttacaattataatttgaaggatatcgccaaggtaaataaggatttaggattaattggggttggtttaggtaaatttaattgttgagaatttgaagatccttgatgatttggtggtggaatagtaggtcttgaatatgaattttcctttgatggtatactttgtggaggtctattttgagatggtggtgaaccttgaggtctctgaggaggtaatggagtatcagggatagttggatcagcaattgcgtcatcataagatggagggaggttcattaggtacattttcattaggatcataaaattccttcattgtttaattgtgtgaaattggaaggaatagagtagtagtattcaaaatgattaaaatgaatttgatcaaagtcataatattaaagaggcttaacctttttttaaagaaaatttaaaatttcatgcagtgcgagaaaggaaggttcttattacactgatttatgttgtggttggttgtttatgtgggttgtatttgttgtatttgggagtatttagtagatttagaatgtattgactgtatgttaaggttatgtagttatcatagtatgagattatgctttttatatgacattttacgggactttttaaaaatttgtagtatttaaccatttttaaatgagaattaaccttaataattcaaaaaatttacaaagttaaaaattattgaaattctcttttcctacaatttaaacaaaacagtgtgtgcttatacagcaacaaacacagtcatcattccttacagtaatatatacataataaacaccatataaacatcacaaaacaaacatccataatataaataaaacctgcaataaaacgccatttcccactactaaagacatcatcgcgttgctctttattttaaatcattttattttattttatagtgtgagagaaatttggattaatatgttggttaagtattgatttctttaatcttttcatcttttcatcggtttttaagctttatctgttcatatctctctataccgacactagcacatcaatatcacatctattagaaaatgttatggcttactcaaacccagaaaatgggtgtatttttttcatctgctggtgctttcctctttatattaggaataatgtcattctttgattctgctttactttcaatggctaatatactatttttagttggtattgcattattaattggtcctcaaagaactttatatttcttttcacgtcgacagaaaataagaggttcaattatgtttgcattggggatattattaatttttttaaaacatccttttattggatttatatttgaaatgtttggtatgttagcgttatttggtgaattcttcgcaacaatggtacaatttttaagatctgtaccaataataggtcctttcttatcaaatccaatggttgctccaattgttgataaaattgcaggtattagagtcttaccaatttaattgtataatgaaaattttattataatatatattctattattactattataattctatttatatatttaattctatttacaaaatattatttacaagtcttgtgaattctaaaactttataatcttgtccatgctgtccaacaatctgaaatccaaaattttcaaatggtatattcattgttggtaatcctgctaatgacattggtatagtacatacatcattcatatatccttcaacttatatccccattaccttcattaattaatttaggtaaattaacacttgctggtacaatcattaaatcaattccattagcattagtcaattgtttcttttccattaaacaatgtttatccctaaatactttattaaactcttcaattaataatcttctaacattacttgccttcttataattattatcatatccatatgaacttaatgaataattacctaataaaattcttctcttaacttcttctccaaatgctttatctctattaaatctaaattctggttcttcaccttcataatcttctgttctaaatccatatctattaccatcatatcttgataaattagatgatgcttcacttgttactaatgtataatatgctggtaatgaatacttaactgatggaatagatattggaattatttcaattaatttattttctttcagtttatttaataatttctcccatgattgtttaatatcttcacttaattcatcaaacttatattcaattggtataccaattttaaatttcttaccaacgttcttcttactatttatcctttcaattgcaatttcctctctacaagaatcacttaaactagttggatcctttgaatcagctaaatctaaagtggaaaatactttccaaatagtatccacttccttcgacataataccaacagtatctaaactttgtgcatatgcaactaacccccatctagaaattctaccatatgttggtttaaatccataaatattattataacatgcaggtaatctaactgatccaccagtatctgatccaattgcaaaatcaactaaatctaatccaactgcagttgctgaacctccacttgatccaccagttattctctgtctggaatctatattattgaagtatcaccttacccttttcatctctattcaattttggtacatagtatttattaactgtatatccttctttaataccttcaacaatatcacttgatataaattcaccattttcatcacctatatccttagtactgaaaataacttcttcataatctataaataaattttcagtttgtggataaagtgaattcaatgttgggccaaaatatgatgatgtagttgaattacccataccaaattcatccatatttgttttaccaatacattgagatcccgattgatttaataatgttacaacagttgaatcgaatggtgatttataatttgataacattaatgatgaacatgtagttggttcatttcttgtcgtaaaattatcctttattgcatatgttgtattgaataatggggaaaatgatgcaaattcatcaactggtgtctttgaaggtgcacgtatagatgtgaatatgttatatttcttattaacagccttaatatgtgctagtttagacatattaaacatggtttaaagaatgaatgcatgtagtaaaatagaagcaagatttatgtagacatgaaaaaaatacgacatgaaatatcaacattgacattcaaatctttgattttctctttttgttccaaaatcaatgccaaagaaccaacaacgtgttatacctagactaaaaccggtgccatatacacttacagatgtatcaacaactttaaaacaacctcaattaacacccgctattgaattaaatcaaataacattatataatacaccagatttaccaaacaataaaagaggtttcaaatatcaaccatgtagaccaaatccttatttacattctaaaatgtattcaacaacagacttaccaccatatggtgttcattggtcatattttgatagatcatcagaaatgtatgttagtgaaaatttactcattgcaggtacattagaggaatttggttggagaagtacaagatcaaatattgcaatacgtgaaggacgttgctatgttgaatataaaattgttaagggaatagatgtgaatagtgaagataacgaaataaatcttaatgatcgtaatgaacagagaactcaaaaacctcatgtacgtataggtttgggtagaagagaaggttcattagaggcacctgtcggattcgatggttattcatacggtattagagatgttaagggagagattgtacatttaagtaagagaactgatattggtggagttgatttatgcgttggtgatataattgggttattgatagaattacctactatggaattacagaaagagatatctaagaaaatgatattacagaaaacattttcagatcctatagatgaagagattaaaaggaaagatttgaaattgttagataatacattaataaataagggtattgaaagagatatgattccaatcaagtataagggagagatgttttttgaggaatatgaatatacagaatctaaagcaatggaacatttacttaatccagtcacagtttttggagagagggctatttcagataaggaaagatttaaaccagctacacttcctggctcatcgatcactttatttgtcaatgggaagaagaaatgtgtaccatttgagaaattatatgcatttttaccacctgctagtgaacaaaagatgacaaagaatgataaaaaaggtaaagcagatttttcaattgatgttgatgatggtagtttaggatattatcctatggtgtcgtcattttgtggaggtgcggtagagataaatagttctaatgatccatggattatgcctgaggatttagaagaacaaataaataatgatgaaatcaagatgtatggaagaaaattcaacgataaagtggtgcaagatattgttgtcgatttaattgatgatgcaataaacaaatatttagatagaaaggaaattgaattagagaattaaaagttaaagaaaataaaaagatatttaatgaaaactaaaaagagtcaaaaagctcaagtttattatcacaaccagggcagctatcaatattccttgatctttccactaaacctttacaataatcgtgaaatcttacatgacatttactgttaggacatgataaccctcttgttagaatatcaccacaaccgaaacaagttgaaattgtaccatttgggaaaacaccgtatgtttcaattaaatattttctcaactccactaaacctctagttgataatgtataattattattataacgttcaagccaacctgaatattctaaatcttttaaaaattcttcagattcctctaatgaaagtcgtataataggtgcaaccaccgatgtttcaccatcatcaccatcaccttcaggtgtttgttcctcagttttcggttcagttggaccatctcttaaaaatttgatcattctcattaatggaactgaatatgtaataacttgaatttcaggtgttgaattcgcaagaacatgttctgatgcaaagattctgtctataatatgtttaatatattgaatttcattatctgtatatcttgttgataatagtatagcaccattaggttttttattaacaaacgagaataaagtaactgatgaatcatccatatcctttgattcaacaatttcaaaatcaagtggatccagtttggaatttattttagctaatacagatttaaattgtgtgctagttacgttaatatcatctatcacatcaacaggtacaccattttgatctgcatatagtgtacgaatagctttttcaaggtaatcgtgtagtgatttactagaaatcgttcgaagagagatgaccaaatcaagtaaagcggaatgtattggggtgtatgcatcagaagatgtcacttgtatcacataatctgctaccgacattgttgcagtgtggtaatgatctatctatacctatatacctatacaaactcttcaaaagaagtggtgtaacagtaattggacgtgtatttacatatatccacgacgcgaaattttgttgtaattttgacaaatttgaaaaatcatgtctttgcttattatggcattggggaattgttttaactgtcatttgatttgattacttttgattaaggggaattgcacattaggaactaactacggacatgtcatattatcaaatgcaccagaatgctaaccaagggtttaaccaagggtatgaacaacctacattcaatcagggaggaatgggtggatacccatcaagtttaccaacaggttcaatggcagacccaaattctgatccatcaatgcaaacattaccgaagggactacttgccgcattatcacctgcaggatatcccggtgaaccaccattattagaagaacttggtgttaatttttcacatattgttgcaaagacacaagcagttctgggactgcgtcgtagtccattagctgatgatgttgttagagatagtgatttagcaggtcctttattattttgtatattatttggttcacttttattattaagtgggaaaactcattttggttatatctatggtgttgcattagttggtacagtttcattacatgcattatttcgtttaatgggatcaggagatgttgatttcttaagaactgcaagtgttgttggttattgtttattaccattagttatattatctgcaattgcggttttgaaaaatcttgataatttctttggttatatattagctgttgcaagtgttggttggtgtacatttgctgcaagtggattctttattagagttttgaatttatcaaatgctagacctttagttgcttatccattagcaatgttttattcagtatttgcacttatgacaatatttgctgaaaagaaagtttaataaaattatattaatagttatagaaaatgatacagaactctaacaaacaattaaatcatttatttacttcactgtgtaaactaggaacgaccaattcataatctgtcgtattactacgatgaatcatcacttacattttcaatatgtaatgtagcaataattccatcatcttctaacaaataacccaaatcagcattagtttcttcatattctttaacattagattcagaagttactgttgctctttttaaaacaggaccagctaagtaatatttatcattaccaccaacatttccatatctttcattataatcttttctctgttaaatttttaattggaattaaatcagaataattacgtttattcatgaacatttcatgctcacgtttctcaccagtacccggttcagatttaaacattggaatcatgtcttccattacagttttagaaaatctatgctttttagctctcattgataaaaatttaaccattccatcagggggtggtgcattaacaattgcagatgagatgaaattagttataaaacttggatcattttcaggtttaattggtttctttgatctaattcttgaaacacatgataaatgaacatctcctgataatatggtaattctaacattattttgtttggaaattgatattaatttatttaataattgatttctttctcttttatgatgagtggcacaccaatgatcatttaaatcatccaatagttcaacttcaccatcaaattcattaactaaacctttattaatgacaccttttcttgcaagccataaaattggcttaataagtggagtttccataattttttcaatgaaaaccattcttggatacataataggaacacctaagagaacaattaaatgtttaatatcactatccaattcagattgaagacgttggaaaactaattcgataagtttcttttgataaaacttcatgttttgtacgttccgctctacaatccaaccctacaaatgcaattgatttacctaaccttgcaaatatcgatcttgaatattgtttaatatatggaccttttttataacctaaaatatatgatggatcaatattttcttttgtttcagtttcaatattagtatgttgttgaaataacatataatatttataagcatgttgaccaactgattgaaaaatttcttgtctcattgtaatatcactataagatccaaatccatcaattatatcatgatcatcaagaatattaatttgaggaattgaagcaagtgcaactggtaaaattgattgaattgtttgaccacttgtaccaatccaataacctttaccaaaccattcgatatatctattaagataaaatttatcaaatgatttttctaattcaggtgtcattttatcatttgaatgaatatgtttatgtttaagccagttactaaacaattttgaagtatttttaatattatcagcataaatttgatcaccacctccaatcattacatgataatgataattagttgaatgtttacgaattacatctaaccataatgaacctttaaaagtacttgtttcagtccctaatgaaaatccattacatgaatgagacattatattcattgattgatcatttgaaggtatgaaaaattgataatgtggtaaagttgcattatttaagtaatatttaactttttgttcataatcctttaattcaaattcaaatgaaaatctaataaatgtgaaacattcctcttgatagaaaatctcagattttgttggtcgtacatgataaaattctccatttctagtatccttagttgcaggaccaattataaatttcagttgaggaatttcattattaaataaatctctaataacaaacataacactaccacgataattatttgacttattttcatgagatgctaagaatctaacagttggaccacaactaatcgatagttcttgtaatatgtaatcatttggacatgcatcctcagtagggattttatcaggatctgcgcttttaacattttcagtgtattcatccaatggaagagaatcaaaccaattatcttctatttccatttccctttccctttctactgccattgatatatactctatacttgattggcttaatgaaactagcagaataaggaaccaaacccagcacagaataaagaataaacaacttcttccctacagcacagcccaagtgaaatgaaaaatttatttatttagaaatctctcgataagaagataatttgtataagcagtgggagtactctgaagtatataaaggtatagcagaaggcatatgcacatagtatccttagagagtcatgagctgcgtgtaaatatatatatatccatatatatatctctacacctatgtgctagaaaagagagaaaggatagagattacaaaaaagacttgttcttgattattatattagaaacaaaaatcatttccaaaaactgtacatgttcttaacaccgtcaaactgaaatttgatcttttacatcctaaattcctatactttcttttatttcttttactttattcttacattccagtccttttttcttcatctttacaacaatgtcacagaaagtagttaaaggtaccattctttgtttacacggttttgcacaaaacggtccaggtttctcagttaaagcatcaggtattagaaaagctttaaagaaagcaggttatcatacagttttcattgatggaccaattgaacttacagcagcagatttaccatttgcagcaaattcattaggtgctgatgataaagctgaaaaaccagattatcgtggatgggtatatacacaagctgaaaaatttgacattcaacctgcatatgatgctattaaaaaggcatatgttgaaaatggtccatttattggtatcttaggtttctctcaaggttcaggtattgtaggtactatacttaatacttttaatgaagttgttggtgatgataaagctttagaatcacttaaatttgcaattctttattcaggttttaaatttgaaaatgaatcagttcaaaaatattatgaaaagagaatttcattaccaacattacatgttattggtgaacttgacactcttgtctctaatgaaagatcccaattattggctgatttatgtgatgatgctacagttcttaaacatccaggtggacattattgtccaagtactaaggatcttcttaagaccgaagtcgcatgggttaatagtgttgtagatggtactcgtgaagaatctaaggaaaccaatgcaaatgaagcatcaaagaaagaaattgatgatcttgtatcttctatggataatcttggtaaagcatagttttatagagtttatatcctataacattaatatagacttaatagagacaccaccgtatatacacaataatagaattaaactcgctcttctccgggaacattctttgatgcatgatatcttatcaaaaaattcatttttgcaataactttactattttttttactatattctttcttcgacacgttcttctctttgaaacagtatctatacttgttttagaacaatggcatctgaaacaacacctcttgtagctacttcttctcatagctctcatttaccatctttgaatttgagaattgctcaagttggatgtgcaatgttatggtgtttatttgcagcaggtcccgtttttggatttgctgctttaaaacctgttcttgtagctcaaggtgtttatagtgaaagtatgtgatatcaatactttaaatgaagtttgtatagaacaagatttgaaattaaataaaatgtttacaatggctgcagttgtcactaatgcaactgcacttatagttggttcaattttagataattttggtccaaaaattacaggtataattggttctttcgttattgcaattgcagcttttctattatcacagggtgcatcaattaccatatttgatgcatatttaattggttatgtcacattagcttttggtggtccatttgttttcattagttgtttccaattagcaaattcattccctggaaattcaggtttaattttagcattacttacaggttgctttgatacttcatctgcattattccttttctacagaattgtcttccaaaataattatatcccaaatcttacattaaataaatttttcaaattctatttaattgttccagttttcatcttgcctttgtcaaatatttataatgcctcatgaatcttataaaactattgaagatattgctaaaatcagtgaaactggtttagatgaatcaggtgttccattagatcctgaagatacaagatactcatcaaatgaagttttatcagttacacgttcaagatcacgtcgtggatcaatcaaatcaactaaatctgtttttgaagaaattgctgatactagattaaagaaaatttcaggtggtattttcggggttttacattcaaaaccaatgattgaacaatttaaatctccttggtggtatattatgtgtttatttacaacaattcaaatgttaagaattaattattttgttgcaacaattgcatctcaaatgacatattattttgatgatgttatttctatccaattgaataaattttttgatattgcattaccattaggtggtattatatctatacccttcattggattaattttggataacttacatacttatgctgttttatgtattcttctctgtgtttcaactgcaattggtgtttttggaatgatttcaatccaattcttacaatatttaggtataattttattagtgctatacagaccattctattatactgcagtttcagattattgtgttaaagttttcggatatactacatttggaacagtttacggtgctattatttgctttagtggtatgatgaaccttttacaaacttatcttgataatgctacacattttacattcaataacaatccaactccagttaatggaactcttgtttcattaacattaatttttggtattggcatgttaattttcattaaatcacaagagaaggaaatcatccgtcataatattattgaagagaccttggcagatgaggatgatgatcaaatacaaacattctcacctcctaattaagtatattttctataatcactctctataacaactaaaataactcttcttatcaagaaccaatccttatcgtaaaaactgattacgcaatctcatcaaaaaataattttgagaggcaaaaggcttaaagcttgatttacgatgaggaagacttctatggctcaagtataaagatacattgtaaatacatttttatttcaaattaagagttgaaatacaccaagtagatgacatcggtttttacgtcaacaatacaatcaaatatattatcgttaatactatcacgattgccacttcatccacttgatataccacaacaatcatctctaacatttaaaggtaataatggtccatcattacatttatctgatgtttcattagatatagaaaaactgcaatcacaatatttaccacctaaaagtccaataaatatacgacatgcaatggttggctcattagatataatcataaatacaacgggtatcaaaattaatgtcaaagatataacgtgtgttattaatcctaaagtaatggaaaattggcaattcttagatccatctaatagtgtacttttgaaaagttttgaagatcccatggaaggtttagaaggtgtaatggaaagtgttattgggtttgttgatgccgttagcggtgtcaacttcatttataatgtcaaatgatgatgatgtaatagatgatgatgatgatgatgatatagggaaaagtaatgcagaacaatcaattaagaatatattaaacaatgataaggatatgagtgaagaattagagaaaagtataaattcatcaagtaaatcctcaaaatcttcattagtcaattatgctatggaatatattatgagtaagatatctgttacaatagagaatgtaaatgttaaattacttgcagatcctattgcattgaattttaatattaataaaattatagcatcaggagcaaaagttagaaaaaaaatgtgaaatccttggtctttctctgtttttattaagtccggagattcaagctgactattatgtggataatagtgatcaaaataataataatgcaacaaacaacgaagaaaatgttgaaagttctgataacgaaagtgaatataatgatgaagttatggcatcttcatttatggctacaggtaaagaagatatggaacgttccatattagaaggggcgatgtattctgcatccggtaaaagtatttatatgagtgctttaaattcaccaattccagaagaaactattgatgaagagattaaagaagaaaaacagatagggaaaatgctggcatacattaaatcgattaatctattgttagttgaaaggaagaatttatctatggaattcgatgatatttgtctgacttttgttccaattccaaatcttgcatctgcattcattacatttttaatagagatgagtaaacaaaaattagttgcttcaccacaggaagcttaatttcaccaagaaacaaacatcttcaaattctacaaattccaatatcaaactcgaattatttacaataactggagtttatgctagtttaaactctcttttagacagcaatggagaattcattcatggtgaagatataataaagatgcatttaatcaattttttacttgaacagaaaagttccactttatttcaaggatctttagaaacattgaaaattacaaatgatgataataactgcttttattttgatagcacaacaaatgatagtcatgatataaaatttgaaattcaaaagagtggaactacacatagctccacgcttgtttttagtaaaactcttgttcttgacagttaagtataatatagttgaaacagctactgatttcaaaaataaattgaatactttttcggaaaaattatcacagttaagaaagattaatttgaaaaaaaataaaaggagttataagaacaaattcagcagttctagtaccaataacaattttgatgtatcttttaaaactcaaaatattaaaggtaatattggattatcgttaaacccacaagaatattttgagttcaagatatcaccagttatttatgattctttaaagaaacttttcaagcttgattacattgaaactagaataagcacattttcaggttttacgaaccttaatttcttaagtttgggatatatcggtagtgtgggtaatatattggatagatttcgtggttatgatacaagctctcaaaaatcaactatctacaacacgagaaatacattttcaatagataaaattaattttaatacttcatacgattcattgaaagcagtaataaagttggttaatgacatgaaatcaaagattttgactagttcagtaataatgaaagaaaaaccgattacaaaaggtaaaactgttaaatttgagaacctagcacagagtagaaaaatgaacaagatgatttcaagttttattgataagcctaaaattgcagacttgtttttcaatattagtcgtattgattattcgataaaggatgttaaacaagtgtttggtggtgtatccggtataatcaaggatgtaggtctttgtttatttgctgatggcttgaaacaattaagtgtttatgatatcagtatgattcggacttataatgaaattatggaaaatatattgactcgtggtaaccaattgttgaatgttccaatgattactattaaatttgatcaaaatactagtatatttttgaacaatattttggcgtattatgaaggtaaatggttatcaatgtttgaaaaagaatttgaagatgaattcaatcaaccagaaataatcataaacgatatagaaaatgttcccaaaatttcatcaattaaaaagaagttattgaaagaagtttcaattattatgaatgatatttctatttcaatgaagccagtcagtttacagaagttgtgctctaattattattgataagacaaacattgacttagtagcatatagtgatcatacgtttgttgttcaaatgatatcagataacgcttccgttttacttattgatgatattaataatgctacaattgaattccaaaagttataaaggtaattggaatactgtaaacatgtggaaagaaagaggttttgtttctatcggtgatctcaccactatcatgatcagattgaaattgaatacaccggaatctttgatccatatggtgaagcctgatgaaaaagttgtcaattctttggttggtgttcaaattgatttggagaaagtttccttggatgtatgttgtgattcactgcaatgttttttacaattagtcaaaaatttgaagcaaccaatttatttctcatatgatgataaatataaggatcataacaaggatattgatttatttgatggaattgatgaccaatttttcaagaagaaaaatgcattaaatgatgatttaaatgcaaaaacaactgaaggtgattcaacaaagagtgcagacttagaaattgttgaaaacttttatgagaatgtctctggtgatcatgatggatccagtaaagtatccagtacaggtaaatctagtagtgaacaagtttccaatatctccatcaactggaaacattttaaagaccgaaatgattcacaacctcttctaaagattattcctttagatattcatataaatatagcacatgcaagtataaatctatttgacggttatgattgggaggagacaagagctcagatcaaaaaggcttatgaaaaactacaaaagaaaaataaacgaaaggaatatgacccgaattctgaaaacattacaatgactgaagagcctatttataactccattattttagatattcaaccatggcagagtgaaaatagtaatgataatgaaaatgagtccgctcaaacaattgatttaggtaaacggaaacttccacctttacaattgaaaagatcagctaaaagtaaagttaatatcaaattagaggatattgatattgattttagtcaattatcttcaaatgaaccacatcctaaggagaaaccaaacacttttaataaagatggaaatattgaaaattctgaatatgtgaatagtattcagataaacattgaagatgttgtaataattgatgatgtaccaacctctagttggaatatgtttgctggctatatgagagaaaatggtgaacgagaaacaggtaaaagtatggttaaaattggtattgatttaattcgtccaatagctacattagctgccattgaggtaattatgaaagttgaaattttaccattaaggttatacgttgatcaagatactttagattttttaacaagatttggtgagttcaaggatgaaagattcgttgtggtgaatgaagaagatgaagaattatttttacaaaaatttagtattgatacggttaagttgaaattagactataaacccaaaaagtttgattatgaaattattaaatcagggcatactagtgaatttatgaatattttcattcttgatgggtcagagattgtactaaataaaattgaattattaggagtcaatggatttagtaaactaaacaaattacttaacggatattggtcaccagatgtcaaaaagaatcaattaggtggtgttttatctggattaggaccatttagatcaatcatcaatattggagttggtatgaataatttaatcactgtacctatgaaggaatatcgtaaggatggacgtttaatacgtagtttacaagtgggtgcatatgaatttggtaagataaccggtggagaaattttaaaacttggggccaaactggcagctggcacacaaacaatacttgagaataccgaagaagcattaggtggaagtggatcatctgcaagagttgtagatagtaatactagaaaaacttcaagtggtagcatcagaactagaagacgtagttcaactgcatcgtttggtgatgagggagataatgattatggtaaatattttgttaatcatagtgggggtgttgaactgagagctcatgatgaggatgatgagtatgctattgatgattatgaaggagaagattatgaagaaaccaatgaagaagaagattatgatgaaagatttggtaaaattgtcagtaagaagaatgatgaatcatatgttgtaagtctttattctaatcaacctggttcattcaatgaaggattaaaagttgcttatggttcaatacaaaagaacttcaaaacagcaaaagatgcaatctctcaggcaagtaagaaggctagtgagagtcaaactactagtggagccgtgtatgagatagctaaggtaacacctattgttatgttaagacctgtaattgcagctacagaagcaatttccaaaagtttactaggaggggtgaatgatattaatcccgaagaggggagaagagcaaaggaaaaatataaacgtgtaacatcaatcaatgaagaagatggtgatgtgtaggagaagttaatcgttatgaaatataatgtataaaataatgtataaaagaagaattaaaattaaatataaaaataaagtacaaaatttaatttggagttaagacaactttcattgcctttgtagttgcggcatttttaaaaatatcataagctttttcaaattcatcaaatttaaaatgatgtgtaataattggagaaggatctaatgaaccatcactaactttattaagcaattcaggagtcgagaaagcagacactaaaccggtagtaatttgacaatttttgatccaaagatcttgtaattttaattcaacacttttaccatgaacaccaacattagcaattgcaccacctggagtaattaaatcttcacaaagttcaaaagtttgaggaataccgacacattcaattgcaacatcaacaccaggttctctacctgggattaaatcttttgtaatatccaaaacttgatttgataaagccatacccttaattgcacctgaattaattgtatgagtggcacctaaagttttagccaattctaatcttgaatcatctaaatcaatagcaataatttgttttggtttaagagttttagcacttagaagagctgataaaccaacaggacctaatccaacaatagcgactgaatctccttctttaacaccacctgacaaaactccaatttcataagatgttgggattgcatcagaaagcattaataatttttcaaaaggaatattttcaggaactttaaaaagagatgtatcaccgaatggtactcttaaatattcggcttgagtaccatcaatttcatgacctaaaatccaacctgaagtaccttcattaccattacaatgagattgtaaatttttcttacaataataacattcgaccacaagcggtaatacatgaaacaatacaaacatcaccgacattaaatttagaaatagatttaccaactgagtcaattttaacaattgcttcatgacctaaaataatacctttctttttgtctttagcagccaatgcagtagtttctggaacatcacctttaagaatatgtaaatctgaaccacagatagtagttgctaaaactttaccgataacatctgttgattttttaatggttggtttagcaacggagcgccattgaataaccccgggttcaatataagtaagtgccttcatcattttttttgcaaaaggaattgatcagtgaaagttaaagcatatatgatacagaaacatatgaagagaggaaataaggaccctttttatagacgacatcagtaatagatgatcatcatacaaccttaattaagcggggaactcaaatggaaacaaacagatttaattaagcttttattcaaatatgagtaagtccgaaatattattaaatgacaatctcatgccacttttctaattggtacagaggctctcatataggaaaatacgttatgcttctccgtatagtatttcattgcatacagagagtgacaaatcccatgctcctgatgatgatttgtgtatatattgataagattcacgtttactgagtacaacacctgtatcatcaactatatttctattatcatctaacggtaatgttaaaatttcaatattataatatgcgattgacacgtacatgtaaaccattgtcactaaaacataagcgggtatcgctaatgcccaccatcttgatggataatagtatatacctattgtattaagtatagaatcaggtaataaagaccaacataaccaaattgttatgaaaatacatgaaatcacatatgctgaaaaacctttatattcagcctgtggagtaacagttgttgaaactgtaacatctgaatcacgagcaagttcatcagaaggagggaatagtgatataatagaggttgtagatgggaactctggcattgttcctatagcattgtatataacatcgatcgacaagttcagaccctgaaagctgtaatatataccggctatattaaactcattgaaatccgggtaattttctcatatttgaaaattcatgtgaggtggtgatgcatggattggtgttagccaataacaaataataataatagtaataataataataataataaataacaataacagtaggaatttctgtatccatatctatacatacagtcatttaataactacaatgggtaagtataatgcattttacaactcaatgataagaagtactaacatagatatatgatatacaggctctaagaagatgtcgcttaatgacttcctctccgattcatcaatcggaggttcatcatcatggattgaggatgatttcgatatatctaatatactcgataataataataatatgaataatatgaatggaatgaatatgaatagtagtaatagtaattcaagtccatttgatagaaatcaaagatttaataataatttccaatcaaagaatgaatcagatattgtagtatttgctaatattgaatcatattttacaagtagtttaatgaaagaattttttgattcaagatatactaagattaataaatgtcatatatttatggatccacatgatccgaaaaagagaaagaaaattgctgttatattcttaaatgatagaggtgatttacagaaagtattaaaatggaatggtataataatagaacgtaatagaattatagttgatatactatcaattgatgattatcgttcaattgtcaatttcaatgaagagataggtttcaatgaaaaggaagaagaagaaaaaataaaggaaatggaacgagaaaaggaaagggaaaggaaaccaataaataatattgtaaaacctagaatacatcaaaatgataatataaacaatgatcgaattccggagattaagaaaagagagaaaattaatccgtttggtaatgcaaaacctgtacttgttaaagaaattcctattgtttcagaaaatactagagaacttgctcaaatattgaagaagaaagaagaagaggaagagagaaaaaaacaacttgaaaaacaaaaagaattagaaaaggctaaagaaaaggaaagaaaaaaatcaataaatccatttggaaatgctaaaccggtagatacattgaaaaaacaattagaaattgaagagcaattgaagaaagctgcaataagtgaaacaacttatgatatgacattattacatattaaagaaaaggaggaacaggagaaaactaagaaaaataaaaaggagaaagaggagaagaaagaggatgataataaagataacacagtagaaaataaagaagaaccaaaagtatggagaaagattttaaaacgtaaagaagaaaaagtagatgttgcaaagtctgaaacaaaggaaaaagatacaaatcatcagaaaattcaaccaaatgacaataagaaagatgaaataatagataagaaaattgatacaaacacagatgaaaaagtagaggataataaagaggattcgaaaaattctgaaagtaagaagttgaaaccaaagaagagaaaaccaaagaaagtattcaaaaatgctttcaaagaaaccgaagagataacgggtttgaaggatcaaaatgaatcaactgagaaaatagaagttactgatgcaaatcctattaaagaatcgaatgaactgagtgaagttaaagatgttaaagagaagaagcctaaaaagaatcttaagaaaaataacaaaaaatctccctccccaattcaggctgaaacttcaaatgaaaaatttgttgaacaatcagttgaaaagtcgattgagataaacaatgtgcatcctcctgttgaacaacattcaagggtacaaaaagaaactccagagaataatcaaaatggtgattcagcagaacctacactagatagacgcacagctcgtgaactaagtgatgaggaatatgcacaagaaatagctaaatttccacaaggatcaagagaatcaagtgggcgtggaagtctaagaggcagaggtaggggacgtggtcgtggtagaggtagaggtagaggaaggggtagaggacgtggaggtcaaggacaaggtccatttttaaatctggtatatgttcgtcctacagaaccagaaacataaatttttaaaataccataataaaatactattattacgactatcccataactttatacacggtatagattattagatttgtagaaatcaattattagatcgttaacaagaaagtgatttgaatgaagtaaaaaaaaagaattgaagtatactggaacgttgtgatcggtatcgggtttcccaagatttaggatccgtgcattgcactcaacaaccggattatactcaaaaggtggaatataacccagccaaccgtccagcagaacactcccatgaattaatatagggaaaggtttatttccccctacataatccctattaattgtggaactgcccagcgtttgcacgccaaggaacctctcaagaggatattgtatggacggtgaataccaccgaatttcccactcgctaagtaaaataagtcgttcagtaagttaaatttaaagagactttcttgtatacgagtacgcacggacaacgtatccagtaactaatcgaaagcagagccaggccacagcaagtgtgccaactacgctaaatgcatttcaacttgttaaaaatggcatttgcctttttagcatgcatgtaatggtgcacgggttttatggtgaatttgcggtcgataagactattgacaaaaatattttgacattcaataataaaaaaatactttattttacacactaaaaaaattttctttctacaacatgaatttttcaaaaattttatttaaagacattatcttgtatcttctaaaatgtaatattattttcattgaataaccacatacataatgagtagaggaagaggcggtttttcatcaagaggtggacgtggtggtagatcattccaaccacaaggtcctccagatagagttttcgaaatgggttcatttcttcatgcttgtgaaggtgatatagtttgtagatcaattaatgaaaaagttccatacttcaatgcaccaatttaccttgaaaataaaactcaagttggtaaagttgatgaaattttaggtccattaaatgaaattttctttacaattaaaccaactgaaggtgtccttgcaacttcatttaaagacggtgataaattttatatagctgctgataaattattaccgttagaaagattcttaccaaagccaaaacaagttggtccaaaacctccaaagaagaagagttcaagaggcggtgcatcatctggtagaggtggttcaagaggtggattcggtggtagaggtggttccagaggtggttttggtgcttcaagaggtggatctagaggtggctttggtggtagaggtggttctagaggtggtagaggtggttcaagaggtggttttggtggtagaggtggttcaagaggtggtttcggtgatagaagataaggttattcttcaaaatattttaaaatcaatatccatcatcattaatatatcactattactaaaactactacattactatttctgttaaaacaactgatttaaaaaaacactaatacttcgtttttactatgtaattatataaaaaagacaaacaaaatttcgttcaagtaaaatcttcttcaactgcatcaggtgcaacatttaagttactcttaattgtatttaaaattctaactttcataccatcaagtcttgaaaatttatcaaagttctttgattcaattgcaatttgatctggattacaatctttaacagcttcaattaacttacttgaaaattcatattcttttgtacttgcaaaacttggatcccattgtaaaaatctcatcaaaactgcattggcacttgaataatcattctcgtctgctaatctacataaaattgccttaaggaaatactcctttaatgaccattttgctaaattgttatttaatgattttttagcaatttcttcataaattgttgcagctttcttataattcttaatattatcatcacaatataaatctgcaacttttaataaacatttattactcaatgcagttgcggaatctcctttataccattcacttgcatcttcataacttttaatcgcattattaatatcttgtaattcattttcataaatttcacctaaatcacatttaaaattagcacttcttctgaattgaccacgttgaacaaacattccgattgctctttctaaaacttttgcagctctctctggtgattccattttataacatttaaaggattcaattaatgtattagatgcttcatcattactttctgctttaatttgtaattcacttgccttttcaaatatttcacctgcttcagcacttcgacgttgtaatttgtataaattggcagcttgaacatataaatctgctgcttcttcgtatttggacgtgctagatcccccaaatatacttgataaaaatccgccacttttattagcaattttattagcctatttgatgttagtacattgttatcaaagattcaaaatgaatattttatattatacttacttgtgcaatcaattcttcagggttcgacatttgttctttgaagaaagaaactgcaatgacattaatttgaatcatcatgatagtgggcgagctgatggttaaaaattagaactcgcatatttcatgatgtaatctattatctttgtttaacatgtgtctaatgtgtctgtatttaatagtaatgatacttacgacctgtagccattcattactgattttaacagatttttaacaaattttgttgttttttgagcaaattaagtagaatatagagtaaatgtcaaaattcttaaaaatataatctgtaaaaaaaaattaaaattaaatattattttgaaactacttttttcaagcagttttagtttagaaaatttttgaaaagacattgctactgctgttttccagttaaaaaaggtcacaacatacttataatccgttatataattacaattttgcgcgcatcacgtgagctaataattttgacacctgcagaaaaaactaaaaatttttgctgtaatggcttttggcaggagggtcaagaggttaggatcaatgtggttatctcatcgtctacagtttgaggtgtccttttcgacttctgcggtcggtattaggcagtgtaagaagttacatttgtctttgccagcaatgaatttggttaccgctggagggtagaaatacagcacagctccaaatccgtgggagggcgacagggataatacttcgctgggacttggattatgagtaatcacatcagttgactttgactgtctttttaaaatttaatttttttaattgtttgacaatcagttgcagtagagcatggttaatgaatgtatattgtagtgaatcaattcatttattttgtttcgaaaactagctacatttttattactttaaatattaaatttataagaattatctacttgtttgacccatccagtcatttctattataatttttcaacaacaatagcagaagctccacctccaccattacaaataccagctgcaccatatttaccaccttcttgagataaaaccgataataaagtaacaatcactctagcacctgaacaacctaatggatgaccaattgcaactgcaccaccatatacattaactttatttgcatctaagttcaataatttggtatttgctaaaccaacaactgagaatgcttcattaaattcaaaataatcaatatcatccagtttcaaacctgcatgtttgactgcctttggaacagctaatgaaggtgcagttgtaaaatcaactggtgcatgtgctgcatcaccccaaccaacaattctaccaattggctttagtcctaattcctttaatttcttttcagaaactaaaactaatgctgcaccaccgtcattaattggtgatgcgtttggtgcagtaacagtaccattttccttttggaaaacagttctagcagatcttaatcttttttcatctaattttgagacttcttcatctctttcaattacagtatctggtttacctctaatacctttaattgtaattggtgcaatttcattcttgaatttaccctcatcatgtgccttttgtgctttcttatatgatgaaattgcaaaatcatcttgttcttctctagtaattgaatgatctcttgcacatttttcagctgcaacacccattgctttaccatcatatgcatcatttaaaccatcctttgaaataccatcaacaattgagttatcaccaaatcttaaaccacctctagctgctggaacatagtatggacaattagtcatactttctgcaccacctgcaacaacaatatctgcacaaccagttaaaatagtttgagcaccaagaataaccgctttcatacctgatgcacaaactttattaatagtagttgctggggtatcttcacctaatccagatttaagggcaacttgtcttgctggtgcttgtccaacattagcttgtaaaacgttaccaaagaaaatttcttcaacatctgttggtttaatttcaggaaccttttctaatgctgctttaactgcatatgatccaagatcaacataatttaatgatgctaatgatccttgaaatgaaccaattggtgttcttgcacctgctacaatataaacgtattccttagacattatttcgaagtttgtttgcttcatataacaaaataaaaagagaactggtgtaaaattggaatcgaaaaaccagctgagcttaaatgagcccttctaaaaaataactttccaaatttttcagcaacgcgtcgtataacgttttgtggcggaacgaccccactacgagtttgtgcaattctgtgatcgataatcttgcaaattatatataattgggtcagtataaagtctctaaacattaggccatggcaacatcaccatctacgtctacgccaacatcagtaatcacactaggacctccatttccaccttgacgttgttgatgctctaataattgttcataagtccaaacagacactccgctttgttggttttttatgtcgattggttgtgctgacgttctcaaaaatttcttagcagaagcaatcgccatatcagtagataaattggtatctgcatctaataaaccctgtgcgatccatttaggtaattgccccttccttctagagaatctacgatcagccaaaaccataacaccataatcatctttacctctcaaaactcttcctaaacattgtgcagcatgcctcattgcatcgaaagataggaaatcattttctcttacttgataattatctcttaaaaactccaatcttgccttcaaaatacgtgactcagtgtattggaatggaataccgatcatcaaaactgtacgtccgtaatgatgatcaaaatcaataccttcagagactttacctctggcaactgacaataaaacagcaccacgtccattggaacatgcctttctatatgtttctaatgctaatgaagtttcttgcgcatctggagtttcaactaaaattaatttatatttccaaacttcatctaaaatacccattgtttgccattgtgaaatgatactttccatgtaaagatacgatgggaagaaaacaaccaaaccatcaggagtgattttagagaattcaatcagtaatgtaccataatttctaacaacactgggatcatttctaatttcaaatctagatgatatagcaacttgatcggaccccttagtgacaatcataggcaagaatgatcggcggtctaatgtcatactatatgattgctgaataactgtatcaaaattgagcattttaggatacatatccaatggtgatatggtacctgaggtgataataacacttgaaaacttttcaaaaattggtttaatggcaattgatgcatccaagcatgaaaatcttaaaataggattaggaactgtggagttttcagtctcaaagggttctaaaattagtgtaaaacctgactcatatgttgcaacgagtgatgcaaaagatgcaatatcttttaacgccataaaatcttcaatttctgatatttgtagtgttcttaccaataacgataatcgttcagagcaaaatcttaatggttttctatctataaatgtcaattgttttaaatgttgtagaaaggatgttggagtttcggcaatgacgtgtaaaaccttcattctagttttcaaatattcaataagtctcttcatgaatgatataaaatgttcagctcttctaatactaccaggaattgcttcatccaaaacatcactggatagcacgggactagcaataaatgtttcttctcctctatttacaatatctgattccctcaaaccttcaactaatttttcatactcatcttgcaatcttgtactgtcaattcttttcacctcttcaacttttttacttaagttattagcccctcgcgtagctcttttcaacatatcatcggtgatatccatacttaatgattcaatacaaacgttatcaatattatgggcttcatcaaaaataacaatactatcaccagataaatccgttgaaactctttctgcaatttttggatcaatcaaatagtgataggaataaataacaatattacataatggcatcattcttctgattgtaaaatatggacatgttccttcatccttacagtatttcagcaattgttcaaatgaatacacacctggcggtatcaaattattaggatctttttcgtataacttttcatgaaatgaacataaatcttcaatatcaccaccttcaccactttcaatcttttgttttaattcaccattagtaattcttctacacttttcatcaacaacgatacccttacgttcttttcctatctcaggatgtaaacataaattttttctacttgttaaacccaaacctctgaaatcttcaacatatcccaattctttcgatcgaaagtccattaatttgtgcaattccaccaatgctttttcaatttctgacatggtacgtgaacaatatataatttttctatgttcaggataatgcatttgatatgctactgtgatagataataatgaaacagttttaccagttccggaaggcatttctaatatacaattcccccctacatcaagtgatttcttgatatcacacatatatgaatattgttcagggtatatcctagggtacgggaaaatgacaggtaaatcatcaataaagaatctaaaattatgacaaaaatgttagtattggttcagctttttctcttctttttgtgtcaataagttctatacttacttcattgcttgtgtttagatcaaacacaattcaaactgaaaaatgaaggaattcaagaaagaaggcaaatattctagttaacacaggcactggtaactagatcttcaattcattacatggcgaggtgaaatttttaaaaaaatagttcttctataaatttacataagggctctacatgagtgttatatacatttcataaattatggtgctttgacatctagagatttaacttcaatctgtttatcagcatctatgtatgaatcactaacaacccaaatgtaaagatcctttttaccaacttctggaatagtgaattcaattttaattgtttgactttccttcggaatagctaattttttgatagagtaaagttcattagatttacgatcacccaaaacaatccaccagtgttcaaatttcttttcaggatatgtagagctggcaattgtaagatcatcaacatcttcatctctattgatttcaacaaatatttcttttgattcaccagcaataactgttccatccaacttgtaattgacttctaggtttggatatttattgacaaaatcagcaacttttgaaacttctttttcagttagtccttctaatatagcttcccttacatcatcttccaactccattatatcatataccgttttaacaccattacttttacatcttttaataatgttgtcgtcaaagaatggaatttgtttaagacaattttcgttactccaaataccttgactaatcatttgacataagtccattgcatacatcgcatttaaatacccctgagatgataagatatcaactaaagcatatgatagcctatgcgccattggcaatatataatacaaatcttccatgaagtcgatacttaaatgctgtcttgaaaagtaagcttgaagtaaaataaaaacttttaatgaaggagactcaaaatgtaattcagaagtccattttaatggtatgctatgatataatttggaaagtgcaaaaccatcattctctctgattggaacattttcaaattcagttgcatgacataagagttctaaaatatttttcatttttagagtttcattcaatcttccaagtatttccattgtggcatatgatatactataatggttggcaatcatacaattatctgttggtatgatttcaattttagtcatcatcattcctcttcattttctgaattattatccacagtgtcatcaatatcaagttcaacaataccagcttcttttaaatcatttaatgtattttcaatcattccagaaagatattcagaaagctcatcatcagtagttcctttcaactgataatatgatgggtttaattgtaattttctgtaaaacaaagaataagtaatccaatcaattgcatattgcctatttttaataagtttaatatcactaaccaatgcatcatgtatgaaaattgtttaaatgactttccaaaggtagcggcattgcaataaatcttttataataatctagtttgaatgaattagtgtatattatggcagtggatactgagttttgagtttttcttgctaatcctatcatttctaaaatttcattgattgtatagtcaataaatctatgttctttaccttcatattccttggttcctaagactaaaacagatgttgcactaggagcccaatgacaagagtctttggtaacaactagacttttgataacttccgagtcaaataaacttaaaacaatattcacatcacttgtattcattgaagaatagcaaaacccaacaccatatttaagacataactttaatgatttatcttgaaccttttcaagatacttttgaactgtttcaagattggttcctaaccatgatttattttcaattttaagcttcataacaaattctttggcgatttcaacaacatctttcttttgattaacaaatatcaagcaatttttttcaccctttctttcatcaaaatttgaaatatgattatacgctggtttaatcaagcatttaagcaaagaaggattatgatgaatttccaaaaaatcgaacttcacttctaatgggaaaaccctttgtctagcttcaaaatcaaacacattacttttcgggacatccaaccaatcagcaaaatccttgtaatttgcaatagacgatgataatgcaacaaatcttatttttttttctagattagttgcaatgtatctaaatctgttaagtacaatttcgtaaaaagaaccatcaataccagaaccaacaatatgacaatcatctgcaattataagttcaattgattgaatacttttcctttgttgccaacgtcttgatatactttcaaattgcagtggtgtacatagaactacatgagattgagctaatatttgcaaatcaattgtgatatctccaacaaacttactaatcacctttccacccgcaagttttgataaagttttcttccatttcttcaatgtgatatcaatacatttttgattaggttgaatatatattgctctaccaccttcatctttccaaagttttaataacgacagcaaagcaatatctgttttaccattacctttagaagttgcaaaaagaacattttcatcattattatagatcgaatcaaagacttgagattgaaacttattaaaatatttaaatgggaaaactgtagtgaattccttgataccgacattactgacaggaactaaatctgattctataacaggcgttaaggctgggaatttcttaggaactttcatatttgttaacatcacaggaatttttttctcacagaataaccatttatcacttattaaagaaacaaaatagttaggttgttcattttcagatagtgggatggaaaaaactgatgtaatgaatctcattaatataatcttttctgacaaaaaattgatcactgtataatattttctcaccatcacaatcttcaactagtaatgtaaaactttgggtgaaaccatggatttctgtatcccatttccaacgaggaaaaatttcaaggtctaattgaatcaaacttggagtaattggtttaactgatgcttcaatatctaattgaggaaacttcgaaactaattcatatgcaagattaccaaatttttcagccttcaacgccttaataacgtgtgatggattagttaaagttagataatatttccaaggagtcatcgatctttcagcaatattaataatttctggtggtacatttggatattgtcttaatggtgtacttgttaaccaaagtttattttcgatcattttgcaaatatttaataaaatcttgacaagttttgcccaacctttctttaaacataaatcatatagtgctctaaataatctacccgcagattgggaaacatataccatatcagccattaatgcaaatccatctaatttaagaccggaaatataagcttgcagtaaaacattgatttttgataaaggatcttccacatcttcattaataggaattggggccttttctaataatttttgcaactcacccttttcttcttttctaacaggaatatacttgaattcttcactagtaccaaataatctaaacagttcaatttctccaaaatgtggttttatttgatcagtaaaatttttcatattggtatagctgatataataaaatgaagaaatcttacctagtacagtcggaacaactaaatcctttaaatagttatactttattaaaccgtttttagcaagaatgagaaatgaagaatatgccaaatcttttcttctttcaattaaatccaaatcattatcatattgaggcccaacataataaatttctctagagtgtaacatacgcacatatagataagtataacccatccaatcgatacattctttcaatgattttattgagccagcaacaatttctgcattaatgctatctgccagtttagaatacatttgagattcaattggaagttgttgattgagaactgcaagataatatttaatttgatcttgtgaagtgataattataccatcaccatgtgtatcatatcttggtctaccagctctaccaagcatttgaagaatatcctgtggtgataaatctacccatgtacccttttctggtgaatagatacttgtacctttaataataactgtgtgtgcaggtaaattaacaccccaagctaaagttgcagtggaaaccaaaactttaatatgaccttcagcaaatagatcctcagcagtttgtctatcatctctattcataccagcatgatgaataccaaaacccataggaagcacttgttttaaatttttattctttgaatttgaagcttctgattttaagatttctctgacaccatctgaaattttaagtaacttatatctatctttattttctgaaagtttattagctaaccatttagctgttttagcagtttcctttcttgaatgaacaaatataataacttgattattttcacttaaattttcgatcaccttttcataacatacatcattcattgcttcatactttttaaatgctttcttttcagttataccaacaaattgttgagccaatggacaaggtctaaatgatgaatcaaagtaatataaaccatttgattcaactcttaaaaaatgtgcgacatctttataatttggtaatgttgccgataaaccaacgaatctaacattataatcaacattatcatcaatatttttcatagttctagcaacaattgattccaaaacaggacccctttcatcatgaagtaaatgaatttcatcaataataaccaatttgactaaattaatataagatgcatcattattttttcttgtaataacatcccatttttctggtgttgtaactaaaatttgagttgtctcaatttgatgttttgtaagattagaatcacctgtaagttcattaacagtaataccaaaatgtgataatcttctatcaaactctctaacttgttcttgcactaaagcttttaatggagcaatgtaaacaattttaaaattatttaattgaaatttcccatttgagtttctaaattttgataaagttcttaaaacagttaacatagcaacattagttttaccagcaccagttggtgcacacattaatatattattatcagctaaaaaagcgctaggataaactttagattgtattctattcaaagtggtcatttcatttgaaggaaaaacagattgagcccattctggtaactctgaaatttgaattgctacttcatcactcgcaattggggccttttctggaggtggaatgtgaatttcttcccaacttttttttgttcttttaaaagatccctttggaagatcaaattgagaaatagtcattaattttgaaccttgtgtgaaaactaaattattaagatcaatatttcttggataattatctgatgagcttgatgatttggctgttgttgtagaagatgaaatctttttctttttagactccgtcaagggattggaattatgatcattatgattatcactatctaattttcttttattattatttttcaaagattgtaatttaactaaaatttgagatttttcagattcatcatcactttgtgctagtttaagtttgtaatatattatttcatggttttgtaccaatatgtagtatagttgattcatttcaaaatcgggtatattcaaaatttttttttcaaaagttcttaaatcaattattttattggtaaccttttcaagttcgttgaagattatcttagagatatctgaatgtttatactcatcaatttttggctgatatttagaaagttgtttggagatccaatatttgtcaatatttgttgaatcaaaggaaattatagtgtttggatcttccgtgtttgtaagtaaaacaatattatcggaatcatcaacatcttgattaacaaaattcatatcattattatcatcttcatccttttcatcttcactatcattgtttagatcttcatcttctgtatcattatcttcaacatcatcattttcatcatcagatgacattattatacccaacccatcactaattctttgatcatcaagatttaagttttgattataatcaataagagaatttactagagaatataataattgaaattgatcatcaggtatatttttgttaattgattcttctaccaattttttcttatttaaagtatttttatcatttgattttaaaatttcaattaaaatatcagctaaagattctataacatcatcaggtaaatcattatctaatatatcatcacaccatttaagtatttggttatatgagtatagagttgattcagttgaaggtacataattaagtatttcaatagtaccatttaaactagttggctttttaacttttgttgatttaagttttgattttgattttttagatatattcttattatcatttaaagcatttaacgatgactcaattgattcacgtaactgttttgtttcatcatctgtatcttccgtatcatttttaatagtatttcgtatatttgaaccgaaatcttttgatgaaataacaccctttaatgaatgaggatttgtatcaatatcatttctatttaaaaaactaccttcatccaataaacgtttatcagtcctcaagactttatttgccatttcttcatacttatactgatttactgtaccattctccgtcatagtgatagtagtatgatttgtgtatatgtacagttaatggctttgatttgccttttttcacttgttaagagatctttccttaggtacaattttatttacatgaaaaaaaaaattaaataaattcattacagatacggcttgattacgtaatagtagacactatctctgtagtaaatacgcttaatagaattaatattaagagatttgaatatataatacagtaatatataccctatatcacatatagcatatacaatacaatactgtataataattcaatagtataataaatcattaatagtaaataataataataataatgataataataataataataataacataataggacaacccacggaaagcagtgggagtcgctccctctttataattaaatttgccttctccactattagggtagacagtgttccgaattttgtatagttgggaagcggtgattattattttagatattggaattaatttaggcaatattttctacttgatatttggtttattctttcctttcgtttctctttcctttaaacaactcactacctatctgataatgttacgtcttttctcaaagagaccatccacagttaaggtcattccaaatttagtcagaagtttggcaactgaagctccagaaactccagatattgctaatttatctgatgttgttgatattgaattaccagatttctcatttgaaggttataaaatggatccacctcaattaaattatcaaactgaaaagggtaccttattacaaatgtataaagatatggttgttattagaagaatggaaatggctgctgatgctctatataaagctaaaaaagttagaggtttctgtcatttatctgttggtcaagaagcaattgctgttggtattgaaaatgcaattactaaaaatgatgatataattacttcttatagatgtcatggttttacctatatgagaggttcttcagttcaagaagttttagctgaattaatgggtagaagatctggtgtttcatatggtaaaggtggttcaatgcacatgtatactaatggtttctatggtggtaatggtattgtcggtgctcaagttccattaggtgcaggtttagcatttgctcatcactatagagatcaaaaaaattgtacttgggctttatatggtgatggtgctgcaaatcaaggtcaagtctttgaagctttcaatatggcaaaattatggaatttaccttgtattttcacttgtgaaaataataaatatggtatgggtacgtcagctgcaagatcttcagcaatgactgaatattataaaagaggtcaatatataccaggtttaaaagttaatggtatggatattttagctgtttatcaagctgctaaatttgcaaaagattggactgaaaatgataatggtccacttgtcattgaatttgaaacttatagatatggtggtcattcaatgtctgatcctggtaccacttacagaactagagaagaagtccaaaatatgagatcaagaaatgatccaattgcaggtttaaaggctcacttattagacttcaatattgcaactgaagaagaaattaaagctttcgataaatcagctagaaaatatgttgatgaacaagttaaattagctgatgcttctcctccacctgaagcaaagatgaatatcttattcgaagatgtttatgttccaggttctgaaattccaatcttaagaggtagaattagagacgattcttggtctttcgaaaagggtggttttgcttataaataaggtaataaaattaattacttatgtaattaagctttataatagtttatatcatttcaatatagtttaaaataatgtatctttcgaaatagtagtacttataaaattattttaaaaacaaaaaagaatttaaagctcaagacaagttataaaataaggtaacaatatgccgatacaaaacgaaataaaataacacaacttaaaaataaaataacatagagtaaactaaaataaaaaaatgtttatattcacaactcaaaataaaagaagcatacctgtaatttcaatatcatgcatggacaatcatatagttaggatcatccttatgcgcacgatattcagaacttgaaacagtctccagtgtagaaacttcaactagattatcatttggatcagcactatgtgcagtagttggtgcagtttcttcagtgttgccgattttttcagtgaaaacagggttaacatttccacgatctaaatcagaatctaaatcataatcgtcgtcatcatcatcttcattagtatatactttttcaggtgattcatgatctgctgatttaatttcaacttgtttagcttcagagatttcagcattggataatccagatggtgcaatacttgcatttgtagttgttgtatcaattgggtcattgtttgaaactggagcagcagacttaacttttgaagtaccattgtcaactgtagaaccgacaccagcagcagcaccaccagcacctgttgtaattgcaattggagcagatatttcagatttatttactgttttgcgattgctcgcttgattaattgaattgcttcttgatcttgactttaatttaaatttagaagtcagtgaatttgatcttgatcttggtgcatctggaatattttccttaactgaactcttagatggaacttttctaatttgttgagctaatggagtattcattttagcaatttgttcaggtgtcatatttgcaattgcttcatcaaccattgatcttcttcttacaaccgctgggtgtccattagtgctttcattagagatttgtgttaatggttcagacactggaactgatgaatctgggaatgctgataattcggatgattcagttggttcagattctgttttatcagtaattgtttcattatcacctgtagcttcttcttttggttcttcttcctttggttcttcatctttcaaaaccggttctttatgttcaaatgatgtatcatgtaaatgttcttcttcttcatgaataattgatggtaaatcagattcctttccaacaacatcattgaattcacccttatagaatggattatcaatattagtagatgtaccagcatttgaatttttaagttcatcatggaaatcagttggcagtctcaacagatttaccttgtggaaccagatttgttgcatttgatgcaatattagatgctccagatgcaataccagatccaccaactgcaacaccggtagcaacaccagctccaagacccagagcaccagttgctaaaccacccgcaacaccacctaatgtactaccaacagtactagatttggtttttgcttcctcttgttcttttactgatttttccagctttaatctttcttcatttaatctctttttttcctttaatctttcaacttctgcagcaattcttgcattttcttcttcttcttcagccttttttcttttcagctaattgtttagcttcttctttttcctttgcaagtctagcttcttcttcttccttttcctttgcaagtctagcttcctcttcaatcttttcttgttcaagtctctttctttcttcttcagctgcaatcttaatttgttcttgcttttgtgcttcttcaagtctaacttgatccaggtgagcttgccaatcttcagcagctttagttgcatcagcttttttggattgcaggatatctttaccagcagtagagtaatgatcaatcttagttgaatgcgcattgaatctatcagttaataaaccaatttgtgagcttaaaacaccaacattggttgtagcttgaaggaatttagaattaatgataccaaaggatctatcagcaaccttagctctataattagaagtacgaattgtttctttcttttcatgtttttctgcaattaaagcttcaacctttttgattttttcttctaattcagccttttttgaatctaattctttttgtaattcaacctgtttagatttaagttcagttgcatcattttcaaatttttcagctaattctttttcttcaatttgctttgatttgaaagattctaattcattttccttatctaatttatattgatcagcatttctgattaaatcttccttgttagttgcatgttgagtgattgcatcttcttctgcttgctcagcatcttgttgatccttaatgattgcagctttttcatcttcaatgtattttgcagctgaagttttagaagattctgccttttgctcaagttccttaaatgcagtatcatgagcatcttgaacatctttagttttagagtcaacagttgccttatatgtagctaacatacccgcaacaactgcttcatcctttaatctaatattcgtttcaatttgagcagctttttcagcgtcacgtgcattgttttcagcaacacgatcatcaatttgtttcattaatggttcaagtttcttttttgctaattcataaatttgttcctcagttaagactaaacctgcacctaaatcaacacgacgatctaagttttcaattttatttttattcataatttgacttgcaatattgaaattatccttgtatcttcttaacatttttggatgtgatttaataactggaggaatttccataactgcaggtttaattgacttggatgctttagcaggtgtttcttcaacttgttttgcagctggttgttcagtttcggtttcaattggttcatcgataactacaacttcttcaatttcttcagcttccaaaggttcctcttcaggatcgacaatttcatactcttcttcttcgaattgttcagggtttaaaggagtttcttcttcttcttcttctttatttgcttctgctgttgcttctgctgttgcttctgcttgttcttcagctaactcagcctttgcagcttcttcttcaacagtttcttcattagcagtttcttcagcagtttcgtcaactttaactacaggaacactacctgcactgatataagagctataatttgcttcatttgcaactttcttctttggtgatacagcaccggaagttctgaatggagaaacccaatcttttgaagattgagagacagttttatgcaaaatagtactattatgggtaccttcttgtgacattgtactcaattagtttaagatttaataatttaaagtaaaaaatagacaattagttaagatttgtaaaacaataaagatctaatccaatactaaaagatagcataaaggagatagtttaattgaatttgctgctattaacaaaaaattgattatcatatcagcagagtaatagctggaggctgtgttgttcttttgtttttcaaatgtcccaaaagagaatcctcattaccggaaagggaaaaacctcataaattgggaaatgcttaaaaatctatgaagcgggcggggataaaatagtaaaatgttacgtaataacaaaatgtagcgactcatcgacgatagtatggctaagtcgagccttcgctgttattacagtgtgtattaatataaaatttgaatcattgaacacatcagagacagagatgactttttaagagaaatatagatagcgggacgggtaatagacttctctgtatattttcttaataagttactacggagaggttcgggagccaatttatagtaacattttcataatgattattattatcaaaatactattacaccgaatcattattggaatcattggaaatgactcagattgattaaaagatcccgggagttttatttaaaatattacgtaactacctttttactattatttgtaatattttaatttattagtaaattgcattgactgcggatttgtcttaatttttgactctgatatttttagcttaaagtgaatcatctgaatcatcttctgattctatcattttaatttgataaccctccaattgtttctctattttacaattcgtacttctatacagtgattatcttatgaatttgataaatattattatacaatttacattatgttcttttgaatatttttttatttacaaatggtccaaatcaatattagtaataacttatataatcaatcgtgcctcatcaattaaattgtaaaaagcaattgcgattctcgggcgtctctcaatttctattattctccggacaaacggtaggacacgatttcaccccattctgctccgaatttctacgatggtgccgcacccttataatgaatgccacaatttttagtctttttaacaattctcatagtaaaaatatatgtcgccaaagtcccctaggcgagggctgaatcaccgacatccggaatgttacgggctgactcatttgtcgtgaataatcggaaaactgaagaaactcggagaatcttttttttttcattcaaaatttttcaacatttctttttattactggtggtaactgattttactataaagtcaacacctgtttccccatattttagaaagattttataaattggaatcatccttcttggaagttttgattaaaataaaactacacacttttctgattgtttttatttaacaaaagagataatgttgagaactcaatttaagtcacttgtcaagaatgtttcaaaaagttcttctttaagaagaacttttgcttctgcttcttcatcttcctcatcatcatctactgcatctgctaaatatttagcaggttcattagcagctgttgcaactgcagcagctgtttacactactatcaactcatcagttgttgcaaatgatgaagttaaacctttagaaaataaaattccagttgaagaatttgtgaaacataataccgctgatgactgttggattaccgttaatggtaatgtctatgatttaaccgatttcattgaaatgcatccaggtggacaaactcctttaattcaaaatgctggtcatgatgcaactactttatataataaaattcacccaaagggtactattgaaaattttcttccaaaggataaacaattaggtgttttagttggtgaagctccaaaaattgaagttgttttagatgaaaaggaaaaggctagattagaacttttacaacatttaccagctctttcaagaattcaaaatatttatgatttcgaacatattgcaagtagagttttaactgatgttgcttggaattattattcttgtggtgctgaagatgaaattaccttgagagaaaatcattatgcttatcaaagaatttacttcagaccaaagtgttgtgttcgatgttcaaaatgttgatacttccaccactttattaggttctgaaactagtgttccattctatgtctctgcagcagcatctgctaaattaggtcatgatgatggtgagtgttctattgcaagaggtgctggtaaagaaggtgttattcagatgatttcttctttctcttcatactctttagaagaaattgcagaagctagaattcctggtgcaacccaatggttccaattatatgttaatgaagataaaaacattgtcaagaaaactatcaagaaggcagaagatttaggtatgaaagcctatttttgttactgttgatgcgtcaagcagaggtaacagagaaaaagatattagaatgagaattactgaagatcatgatgaattagatgatgatcattctgttagagctggttctaacatctggtgctatgccatctttcattgataaaagactgtcatgggatgaagttaaagaaattatctcattaactaaattaccagttttattaaagggtgtccaaagaactgatgatattgaaaaggcaattgatattggatgtcaaggtgttgttttatcaaatcatggtggtagacaattagatacttctccacctccgattgaagttatggcagaatctgttccaatcttaaaggcaaagggtaaattagatccaaacttcaacattttcattgatggtggtgttagaagaggtactgatattttaaaggctttagcaattgccggtcaagattgtaaagttggtgttggtctcggtagaccatttttatatgcaaatactggttacggtgaaaaaggtgttagaaaagcaattcaaatcttaagagaagaattaaaagctgatatgagattattaggtgttaatactcttgatcaattagatagttcatatatcgataccagaagattgattggtagagatgcaactaaccatattttcaacaacaactattatccaatgactcaaattcaattcaagaatggtaaataattcattcgataatttccaaagattcattctattgatgattgattgagagaacctaactctctaccaaaaattttatagacatatcagttgttcaataattgaatctcgatttttttcttccactttttacactctttacacaaaagcaacttgatttacttgattttactttttaatctattccattagtaattactatttgtacattttataattttatctgggtttataagaagataatatgtattttttacgtctttaagataaaaaattaatgaaaacacggtttacgtaattaaaaattaatagatgaaaaagttatcaatgccaatcagttgatactttgataataatattattttacggagtggtcatattatagagacataaatataggcattgtcggcttaaagaatatgagtttggaaaccgatgatgatgatcagtctgcaaattttgataaatatggggaagatataacagagcaacacaaaccattatttaattctgaaatacccagtaatgaagctcgtcccaatgaacttaaacaagttgaaactaaacaagatgataagcctattagtattcaaaagatcaagagtaatttaagtgaaaatcttaataattggaacacatctaaaccatataaaaagttataccaaacggcggttgattttgcaaccccgatggatcttttggaagatttgaagagaaaaaaagacgatgttggatatgaatctgatggtataagaagatttgccccaatatcacaaaccgaacaagaaaaggaaaatgaagaattccccaatgatcataaatcaaggtactggacacctaaaaatattatgaatattgaagatgctccatattctaatagattagttattatattgttaatgttgagtttttcatattttggtaatttagcaagaatatctttccaatcattattgacttatcaaaatgcatatatttattataatcctggtacattgatttggataaattttacatcatgtgttattgcaggttttgcagatagtgcatatgatttctgggatgctatgtcacaaggttccaatcgacatctaaatttaaaacaaattcctcttcatactggtataactgcaggtttttgtggttgtttctcaacttattctggtgttatctcagaacttgtattcgtaacgataaatggatctttaccagtgccaaataacggttacggagtgatgcaattttttgctgttcttattacacaatttggtctatgtttttttggtatatatttgggtggtgatttggcttatggatttgactattttttcgtaccttatatcaaaccatatgtgagtatacgaacttgtcggttccttgaattttttattataattcttggtattgttgccacaataattaatattgtcctctcagcagtgttggattatgataatacttataaaaaaagatactcaattgcatgcttatttggagttttcggatgtcatctcagatacaaattgatggaattgaatggtaaaattatttccaaatggtttccaactggtacttatatcgtcaatgtaagtgcatgtataatattggccgttttgaacctattactatatggatattcagacaaagagaacaaagcaagactgataacaaatccagtttatatttgtatcattaaagcttttgcaaatggtttctgtggatctttaagtacatttgcggcaatggttaccgaaatggtcaatatgggaaatcctaaatacaggtacacctatttttcgatcatgttcatctcgtgtttcataccagttcttttaatacttggttgttattattggacaaagggaatggctcccgtgtagattatattaattttttatagattaaagaggttttatttataaattattaaagttgaacactagaatcaacttttggtattggtgtttgaggtgttgcactgttttttgtagtaattttaccatctttagaattttttacttgtgaaaatgccttatcattgagaaattcttgtcttttctctaatgtacccttttcagattgtacccatccaggaaataacatcaaatatcctgtaaaacttcttaccacacgacgacctttcatttttgcagcttctatcaactgtacttcttcatctttttgtggatgatctttgaaacctctaagatctttcatacttatcacacctttaacgttatcaagcatggaaatttctgtacttttaagtttcgatcttgttggtttgattgatccatcaggtttattttcatctgtaggttcaacattggcaaatgtgttcgttaaattagtatttacagtatcttcataaatattaactggtgcattttttgcccattttcctggatgggtattacttgtatctatgtttctgacgatatgtggattcatggtcaaaccactcacacccacacgtatatttgtagataacttattacctgtgacattgtttaaattgagattgttacttggtgcaactgagtttccagcactacctggagccgagttcattgcactggatggtaatatatccactggtttgggttgtatgtccacattaccatcattaagtttaggcaatattttagttgagttatcactcagcttcaacgtaagtttcacacttggtgtagattttccaattttagaatgcttgacagctttgttatctgattggtcatccaattctccatgatcaactgacctcttttttgatttagtatgtggttgctcatgataaacatgtgcagtgagttcaggaaatttgctgagtgtatctgaaggtatacttagcgttaccagtttggatctttttgaagccataatggattaaacaattctgttacggaaaggaagaaagagctacagtgttaacattgaaatgttcactcacccacacatgtgttgtctctataataatcattgacaagggtttgtttgttaagattaggtaatacaaagtcggttatgttctggaattgaggaaactactcgctacatggaaatcttgggattgacaaatgttgcggtacgcaatttatcgggattagttttccgtgataggaaagtgttatatggtcttatctctttccataagtttctatcgaactatgatcaattgttgggtgcatacatgaaacatgtttgaccaagattgctccgatatcagcaatgatagggataattagttttgggctctttaacccgattggatgattcaattatcagttcggtgtaattatgtttcacatgaagaatcaggcaaccattaattggaaagataataacccaactacacaagatatcggggattattcggaattgcagataagggaaatgcaagtaaggaatgaaacgcccgaaagcaaaagtatataaatataccctattccgctagtcgttgacacgtctagtgaagagctttgtcgagaagtcctttatagaacatcgaaagatattactatctcagagatacaactataacaatctattaaggaatccaaaggctaagatagtttcaacttatatattttagcttacataaccatttatttatttcatttataagcgactaatttaattttatttactcaaatctgaatattgttgaactaagaaggttttgcgcgtttcactcaatgcacaccatgccgtaacttaataccttaggtcacatgttaaccaatgctgacgtctgtataaaacctagacagtatcatttcaacaagaaagtgaaatattagatttgtaaagttataaattaggtagagaaatatcatctttattcgagtttactgtaaaagataaggtatacagattatcattaaattaaaatacagatacacattcaaacatcaaataccaaatccaccacccataaatgcattacgggcattcttcttattgaccgcttgtggcccatgtagtttatcaattttaccagatggtggcatagaattgataatattattactatatgatggattcttagcactttgagggattccttgagaaggatacggtggataaccttgtggtggatacggtggataaccttgtggtgggtatggtgggtaaccttgcggtggataaccctgaggtggatatggcggatacccttgaagtggataaggaggatacccttgtggtggagtagggtattgaggatagcctgaaggaggttgtccttgtgggggtggtgggtacatttgtcctcttgatggtggtggcattgattttctagtgtccttcttcatctgaatactattatttggcggttttgctgatgagaattgattatgattttgaacttgtggtgaataatattgtgttggtatttttccagctgaattattagaaacatggattcgttgacctatttcttgatcgtgagaataatgtactggctctgatgaaaatgaagattgtggaaatggttgcattttaagagaagttatatttgatttacttgtaccagaattgggtgaatatgaatgatcactattagaatttttagacattggtgaatttttccctgtgtagtatgtattattacttgaataagtgtttgaattacttgaatggttggatgattccctagaatgatcagctattttatcatcaggtataactgaaagatatttgctaacaccttttggtttacctgtttcaacagtagaggctggataaacagaagagcttcccgatacaactgactctttcatagacattgatggtggaggtggtgccttacgtattctactatttgaaacttttcttgcttcaccatattcagatttctgtgcatccagatgattcatacaatctttgaattctgcttctaaatcttcaaattcggtttctaattgtttattggtgataggtgcagaattgatggcccttttatcagctgaaaaacgttcatcacaaatttcaggtggagaaagtattggtattgtttctggtgatctcaagtttaattttggtgtagggttggtctcgtatgagatgtttgaatcggaatgataagagtctggagatctactttgatctctcagtatttcaaccctttgattaggaagcgtgattggaacttcgtttatgactggtgatctctggttttctgcaaggtatggatttgaaggttcaggggaacgtagtggagatgatgaatgtggtggtgaataaacagtaggtggtaaatttgctataggcggataattcgatcttggcggtgaataacttctcggtggtgattgttctctatttggtgaatatgttctaggagataaatgctctctattaggtgaataagttcgaggtggtgaatgatctttaagtggcgaacgtgtatatgccagataattagctggataattatcttgagatgaaatatgtttctcttgtgagtcatatgtttgattaatgttacgagcattgccatctgatacaagatctccgtttctatttatttgaggtgaatttgcattttgaggatatggattatatgttccaactactttaccagctcgtcttctgggagaacgttcgggtattttatcattagatgatgtttcatagttattataatttgctgatgagctattttctgcaagctttgttatacgtaactgttggtaatacctttgactttggtaatttaggaatgacagaattttctccactattaaaattgaaatcaatgcccagcgtatcaaaattcaaaaaagtactttcttcatccaaatttggcaaggatatacgaattcgatcggatgcaagaagtatttggatttgttttttcaattatgctagagctctcaggtactgttatagaaggcggtggttttcttattttactagtttgagatgaagtttctttgtttgtaccagtaatccttctttggtaaaggtgggggagcctgtttcatttttttctctaacatatctttctcctcttgttttttcttggcttcatgtctttctatttcaactctttctgcatccaacaatgcttgcttttttattcgttttgcttccagttcagcctttttaatttcttgctccaattgttttaatttttcttgttttaattcaagttctaaatcgtatccatctcttgctaaatcttgctcctcaacaatgatccattttctaaaaccttcggctagttccacttccataatgtacgtttttccaaaggttttcttttttaggtctgtttgttcaattccaagagaagctaaccaggtccaaataaaataatcttctatagtaactcttcctataacagctgtgaaatattcagttgcatccttttttgatgacatcctctcccttgaagtcatatcagttgaccaaccaggaacaagtttaaatttcaatgcacttttatctttaccatcacaaatcaaatcagaatcatacaagcataagttatctaataaacgtgcgccttcagcagataatttatctgatatttcatttttatctttgaaaactctcttcaataacaaataatcttctcttgtataaaataaggttggatcatcaaatttcaaagttttattgactcgatttagtagttcaaatggatttttggaagggttatttgatctgatcgtcaccattggaatttcttgtaaattttttgaagcttctatagatgatgcagtaataggaggaggatattctgtagacttaagtagattttggaatattctaggtaatttatctaagtcgccattaggaggcattgatttcacaaatgctaataataaatgaaacatggcatctccagctggaatccattcatacaaacctctttgaaatgatgggaccccatcattcttacttttgacaggactgaaagcccataaaccacatagtttgcttaattttttggcagtcattaaattttcttttgaatttaaaattaaagcaacaattaaatcaaagaaatcgtaaactatggatgcatgtgctcctgatgataaacaattaggcataaattctagaaaagctttatcaggaaaactcgatttgtcttccattttaacaaattcagtatatgccttccagcctataattgccttaccaggtaatctacaccatataaatttcaaagctcccattaaaatatatttattggctgatttgattatttcctttgcttcatcttcttttattggcattcccttgacaaatatagtattcaaaaactttttaagatctgcatcgtgttgtttaggtctgaacggaagtatcaataatgggaccttggtaccctttcttttcaattctgatgtgatcaaatgtattaaatctttaacatttttacgttcaaatgttatatcaaattctttctcctcaatatattgatcatctgttttaggtttataagattttttgaaatcatctagtttgtcatctgtcacatcggggcagtacataaatgaagaatctgttttcgattctcccattttaacagaatctgagacaataaaggatggaatcaatggaatccccttgttcttcatgtttatgatcaggtctcgcagataaaccggaaataagtcactaaagtataaaaaaaagatagttttaaatgctgttgatgtaaatattgattcaatattttgatcagatggaatttttttgttagtgcgaagcttaacaatttctgctgggagattggtgtattgttatatacgaatccgctaatggaacagttactttcctttattttagatatatctggatcattgattaacgtgataagtaaataaaatggttgtactatctgatgtggaaatggaaaagctcaaagctaccaaaactattggtattattggattgggagatatgggtcttttatatgcccgtaggttttctgaagctgggtggaaagtttgtggatgtgatcgtgaagaaagatacattgaacttaaagaaagtatgtcatcccttttaccagatgttgaaatctttaagaatgggtttcatgttactagattagcagattacatcatttactctgtggaagctgaaaatatcgggaaaatagtctcaatgtacggaccctccacaaaagttggtgctaattgttggtggtcaaacatcatgtaaaagttctgaaattgaagcttttgaaaaatacttaccggatgatgtggaaattgttagcgttcattcattacatggtcctagagttgatactactggacaaccattagtgttaattcaacatcgtgcatcagatgaaagttttaattttgttgaaactttaatgtcatgtctacattcaaaacatgttcatttaacatatcaagaacatgataagattactgcagatacacaagctgtcacacatgctgcatttttaagtatgggtgttgcatggcataacagtcatcaatatccttgggaaacacctaaatggacaggtggtatagaaaatgccaaaattaacatttcaatgagaattttttctaataaatggcatgtctatgccggattggccatcaccaacccttctgcacataaacaaataacacaatatgcaaaatcaacggaggaattgtttacattaatgatccaaagaaagaaagatgaactaatgaaaagaattttagaagcaaaggagaaagttttcggtcacttaggaaagaatcatcaattattattaaatgatgatttattacaacaatactcattatctaaaactccacctggtggcaaccaaagaaattcacatttatcacttttagcgattgttgacagttggtcacaacttgatattgttccatatgatcatattatttgttccactccacttttcagaatattccttggtgtctctgaatatttattctgtactccaggattactagaggattgtataagtgtttcagttgatgatataacattccgtcaagatgatttacaattcacaatggcagctaaggaatggtcaagtactgttagttacggagatttcaacttatacagacgtaaatttgaaaatactcaaaatttcttccaacatatgttcccagaagctacaaagatgggtaatgaaatgataaaaaccattttacaacgtgtcaaagacaatgaatcccaaaactagaatatttatcttatagatgtacatagactctaaataactcttaataactcctattaataatatattaatgaaaaacttccctaagtaaggccccttagtgacgatgtgaaacgccttagtgcggaaaattcgaactcactcaccaggctttttttttcatgcaactataagttttgatcagatcatcaacaggttaatcgcttcgacttttttctcttttcctttctagaagttaagggtcagcagtaaaaatgggtaacatatttagctcgatgttcaataaactctggggagttaatgaagaagttagaattctcattcttggattggatggtgccggtaaaactaccattttatataaattacaactcggagaagttgttaaaacaaaaccaacaataggatttaatgttgaaactttacagtacaaaaatatatctataaacatgtgggatcttggtgggcaaacatctattcgtccctactggcgatgctattatgctaatactgctgcagtgatttttgttgttgattccactgataaagaacgtatggaaacagcaaagcaagaattacatatgatgttaaaagaagatgaacttgtggatagtgcattacttgtgtttgcaaataaacaagatcaaccaggtgcattgactgctgcaaatgtctccaaggcattaggtcttgctgaattaaaggatagaagttggagtattgttgctacaagtgcaattaaaggtgaaggattaactgaaggactggattggctgattgatgttataaaggatgaacaattgtaaagctagatctatatatatcatatatatccaagggaatgagatgtattaaataacatcgatgaatcaaaatattctcttcagttcaacaacttatattagctaaacatgtataaatattacctataatgttccacatacttaatcaatcaataatttacgaataattctgtaatcacctattctcaatgctttaatcatgttttgtcaattaaatttgataataaacggcttccatttccgtagaatctgagggtccggttaaattcaagataatttgaattccgcatgtcttttccactccctcctatattattgtctttcttttttaaataactacatctagcataataatggaggttataatacggcgtcaaactatgttaagatcatctggaatactaagaaaaggcttacttcaaatacgaaatgtttcaagtggaagtttgaaaagaaataatttacctcaattcaccaataagtcaccaaaattccattacaaattgttcatgggggctggtatcttttcatctactgtagtattattcctcaattataaagaaatacacaatgacgataataaaaaattattggtggaaggttcacagccctttaaagctaacaattggcaaaatgaaacatctgtgcagggtactttaactccagatccgtcccagtcaacatttgaaatgggattgtttgttgcatcccaaaaggaaaaggaaagaatagaagacgagtatagaaatgaacgtcgaaataggaaatatacaggatggttatttaaaataggattcattatgcaagattatgtttatgaaccaattgtgacatttggaaggtttttagaactcagttgtatttttttcccagttttcttagtttatcccataactttttttgggaagacaactaaaacaggtgatagaactggtgctctgttatggtattggcttttacgtcatgcagctgaacttggtggtgcatcgtttgttaaattaggtcaatgggcagcatcacgtactgatatatttaatcaaggactatgtgatgaatttagtaaattacatagtaattccaaagaacacagttttcgtcaaactaaaaatgattctgaatgaaacttttaaaggtgtagattttaatgaaatatttgacgaattcccagaaaagccgattggatgtggtgcaattgcacaagtttatttagctaaacttaatgaaaaattcattgggaaaaataataagcacgatgcttatgttgcagtgaaagttgtacatccaagagtagaaaagaatattgcaagagatttgaaaattatgtcattttttgcaaatatgattgatgttattccaacaatggaatggttaagtttacctcaagaagttgaacagttttcaattttaatgaatttacaattagatttgagaattgaaagttataatctcaacagatttcaagataaattcaaaaacagcaatgatatacacttccctaaacctagattcagctctagaaaagttttaattgaagagaaaattgctggtattgagatgaacaagatattagagataaaacatatgagccatgatagaatgttaaaatccattagtgacaaattaattgattcatttttgaaaatgatgattttagataatttcactcatgcagatttacatcctggtaatatttttgttagatttgttaaatccaatagtcacaataaggtacctgaagagattgatgaatttgaaattgatcaactaaccgataaattgaactctttatcttccagtgatctgagttccgaattaaacatgttattcgaaaataagtatgtccctcaattatgtttcattgatgcgggtcttgttacagaacttgatgatagcaataggttcaattttatttcattgtttaatgcattagctcaatttgatggttataaagctggtgaattgatgatagaaagatcaaagacacctgaaacagcaataaatgaagaattatttaaaatcaaagttgagaaattagttgataaagttaaagaacgtacatttacattaggttcagtttcaattggagatttacttcgatagaatgttaggtatggtacgttcacatcatgttagaatggaaggtgattttgtcagtattgtcgttgcaattttaattttagaaggtatttgtagacaacttgatccagatattgatttatttgcaaggtgggtatttgcatggacaataggatttccaacaatgcaattttaatgcacatctatgtccaatgttttaattttttatttctcttatttcatgaaacatatactaacattatttctactgttttacttttctacagatctattccaattttaagacaaattagtttccaagaaggaaagctgatttttgagaaaatgaacaagattgccatgctcaaagtttgggccactttggaagcaagacaattcatcaatgcttcagtgcatgatgtttatcaactcgttaaatctgatggtttagcaccaaactattaagtaaactgctataaatagaacaataatattgttatcattattattatcattattattattattattgtatataaacttgaattgatttctgtaagtggaaataacttccgcattaattaaaatttatttaggaacgaggcatgcatggctaatacttaaaaatttattgataacaattctttctcaaatttaagtgtgaagtgttgtcgattgcgatcactcaaatatactggcactcatatacatcatatgtttatcctgcttcctcaatttcattaaaactttggacttaaaattgatctaatagtgtaaaagttttgaaataaaggcaaatgaagttcggacatacgcttttgactcaccaggttcctgagtggcaacagcattatattgattacaaaggattaaaaaaaattattaaggcaatatatcttagacaacaagaagttgcagaatctgatccagatgttgatgtccatacagattctcaagtgaaaatcgatttggcaagatttttctttcatttagatgttaatttagaaaaggtaaatgatttttatacttccaaatatttagattataaaagaagacttaacaagattgctaatgtgttggatcaaaatggggatgatattccagatgcaggaggaatatgatgatttgttagatatattacttgaactaagaaactgttttagaaaccttaaatggtttgccgaattaaatagaagaggttttgttaagattttgaaaaaactggataagaaggcagggtactttcaaacaagaagaatatttgaaattaaaggtttatacttcttcattttgtaatgaatctgaaacaattgaatcattgacaattaatcaataaacacttgaacaaattattaaattcttcaaacaatgttcaatctgaaaatctctcatcatcatcaacttcaacaatttccaacttagagattaataatactatcaaaaaaaatgtcagtttatcagaaactaatcccaccaaagattgttcacaatcacctattaattttggagttccacacaccaaagtttccagcttagatgtctattcagtagcaattaaaaatgatgatgctgaaaaactcgaaacactcctcaataaaaactttcatgtcattaaatttggcgcctttaagagttctgttatcattattaaataaagcaactttagaatgctcatataaatgtattgatagtttactccaaatcattccagtgttatccaataatagtgatgtttccggtagaaatttcttacatcaccatgtgattgcattaggaaagaaaactttggatgtggatcatgctaaaaacaaaattctttacaatgctggtgaactgaaaagagcggattataacgaatcattgttgaaaacatcaggtcctgacggtattaattccaataattcttttgaaggtttattgtacatgtttgagaatttaccaccacatttaaaatttgcaatcttggaaaacgataactataagagatctccgttacattatgctgcacaatacggtttgaaagaggttactcatattattattagatttttaaaagaatggaatatgtttaatgacaagcgtttccttagatgatgtaaaagtatggggtgatgctgaaagtcttacaccaatccatttggcaattttaggtaaacatccaaagacagcaaatgtgttatttgaggcgatggacaaaaatatttctttaacttgtccttatttaattcatgttgcaactaggatgaataatcctgaattattgaaactgataatcaaatgtaaagggattgatatcaattattttgaaaattcggaatcaaaggaaacatcagttatatgttgcatgtaaacttaacttaaaggaaagtgtcaaaactcttcttgaaaacggtgctgatacagaaattggtgaagcaacatttggttggactccaatctttgttgcggctgcgaatggttatgaagagatagttgatttgctaattgcctctagtgctaaatattatatttacgatgaaagtggcttggaatcctagagaacatgctgctttagcgtggtcatatcaatataattgataagcttaccccagaaaattatgatccatatgaatcactagatattacaaagtcattatctccaaggttagcacctcaggttgctagaaactcttcaacttcaagtattcacaaactttcagatagtagatcaaaaacaacacccgaaccttcaaatgaagccattgatttaaatgttcttaaagctattaacaattcagtctactcaattatcaattaatgaaactaagaaagacaaaacagttgttggaaatagatatcttaaaaaaggagaatcactgattttgatttcaattggtactacagatttaagagatgaaacgccagcgattgaattaaacaagattccttcaactgaaattcacttcaactgaacttagattctgcattatcattggttgttacttcccctaatgtagatcctgaaaacaaatattctctttcattacctttagatgataatcacggtagctcaactgatccaatcacattcaaatgtatcgatgaagatccattcaatgctacattatactttgatcttataccaacatttgactatgaagtgaataaagtatcatcaactaataaaaagttgggtagaggtgttgcaattctgaaaaatttatataccggtgttggaagtaacaaacgatctttattcaattgtgttagaatccctatcttgagtgtcaatacaatggaggtcataggtgttatcaaatttgaagtcttaattgtgaaatcgtttgaagaaactgatagtattccactagatgcagatatttattggaagagtttaagacatccaagacttattggacatagaggtaatggtatgaattcaagaaataaaaaatcattacaattaggtgaaaatactgttgaatcgttcattgcagctgcttcattaggtgctcaatatgttgaatttgatgttcaattaacaaaagatgatatacctgttatttatcatgattttattattgctgaatccggtattgatattccaatgcaatcattaacattagaacaatttatgcatttgaacttgggcaaggacaaacataataatgttaaagagaatgctaaaattgtcaaagatgatttatacatcagagctagatcaaaatcaaataataaactagaagagtttgatgaagataccaataatcaattaaataatgaaagaatgaaattaacaaaaacatggaaagctaaagaatttaaagcgaatacaagaggtagtacaattgcatcatcgtttcactacacttgaagaattatttgacaaggttcctaaggaagccggtttcaatattgaattgaagtatcctatgttggatgaatctgaagctgatgatattggacaaattgcacctgaaatgaaccatttctgtgatgttatacttcaattagtttataagaaatacaataatagaaatgttatattttcatctttccatcctgatatttgtttaattatgacattgaaacagccatcattccctgttttattcttaacagaatctggtgttaactttatggcagatgttagagcaagttcgttacaaaatgcaattagatttgctaaaaattggaaattatttggtatagttagtgattccgttccattgattaaatgtccgagacttgccagtgttgttaaggcgagtggtctagcttgtttcacttatggttctgaaaacaacaatccagagaatgcaagattacaaattgatgccggtgttgatgcagtcattgttgacagtgttatagctgttcgtaatgaattgtctagatacgatgatgagctatctaaattgaattaaatgtaagtaagtagtgtgttacgtaagtagttgattatgtaataaatttatctagaaattttacgtaatgatctgtgggacatgttatcggattgaaggctgagtacatataaaaggagtaaattagtgcatgattgaagttatattaagatctagctacttggttttctttcttgaaacaaataaaaatgagctcaattattgcaagcaacttaccaattactgccactgatgcaaaaatcaaggaattcttcactttctgtggaaaaattaaagatgtcaaagttactgataagaaggaaaagacacaagacgttcaagttacatttgaaaaatctagtgccatttcaactgctttattattaaatggtgcagaatttgaaggttcagtaattgaaattaaggaacttggtggtgaaaaggattccgaagcatcaacctccgataaggaaactaaggcagatgatgcagatattgatcaagagagtaaaccaaagagtgctgttatcgcagaattattagcaaatggttatgttttacaatcttcactaattgaacgtgctattcaatttgataaggagaagggtatcagtgataaatttaatgatttcataaagggattagatgaaaaatatcatattcatgaaaagaatcaacaagttgctgaacaaactaacaatctgtacaatgattggggtattgaaaaacgttggaatgatggtatgagaagtttaaatacttacatcgataaatttaagaaagacaaatatggtagtcaagttcatggattttacaagaatgttgctaatgatgtgaaaagtgtcaatgatgaagcactgagacttgctgaacttaaaaagcaacaacaaggaagtgaatctagtagtggtccaggtaactcactcaatccaacaattagcagtatcacacctgactcaagtactgcacaagctgctgccgctgttccatttgaggaaactaagtagttttgaggaattatagttttatcaaagtttacatttatataacctatttaattatcaaattttcatgaatttttattctctattaaaatatttataagtttactacctgagtaaaagtaattgttgtggttttaatgcagccctacaaagaggacatgacctactctgttgtgcccattccagaacacacgtccagcaaaatacatgaccacaaccagctgcagctgcattttctaatggactcaaacataaaaggcatggtgtttctgttttaaattccactgcttcttctgtttcttccttttcactatcgtgttccttttcatttacattatcatcaatatcaacaaccagcttttgtctctctttgactatatcttttaccttgacaattccttgaaatgttaactgtgctgcgagtgccatacctaaatatttgtattttcctacattgctattatctttagaaacttctccactacttgacacatattccattcctagtaatcttttacctatatcatagtaccttccaaagaaataaaataatatcaaattgagttgactgagtagtttaccatattgtgtaatactccctaatcttgttgcaaacaacgggatgatgcatgcaattacatataataatctgcgtctaattccaatatttcgattattattaacatatctgatatcaacatactcttctcctaatgtacgtgatccaattcccattgttgttagaagataaaccactcgacttaatatacgaatccaattcttacctctttgaacaaatgctgcacccttaaattcccttatggtatccaaaattttactttcaacatctttaacaaaagattcatctttttggtgtgctcttataatagcagaagccttagctaagttcaaatatcgtgagtattccattgtaacctacacacctacagaagaaaccaagactctcttccccagtgtataatcttcctgataacagtaaaattgttcatgataatcacaacaagtcgcgtctttgcagaaatataaagtaaaaaaaaaaatatctttggcattcggtccttccaacttaatgctacatgactcaatggctttgacatggcaagtgaacagcacaataataacgatacctctcagaactcactactacacgagttacaagagagtctaatggaaaatgagacaactactaatgaaacaactcaagaaaaactgattgaaaatgaattaacaccgttctctttacaattttggaaacctaacaacataatgtccgtagaggacactcctttctctaatagattcctagttacattacttgtgattgcattttcaataccgggaaatcttgctaggatttcattacaaaaactaactcaatatgaaaatgcttatttaaattatcaaccaggtacagttgtttgggttaattttgcagcttgctttataatgtcttggtgtaataatgcagtattattttggtcattgatactaaaagattctaaaaaatcaaatatgaaacaattggcgttacataccggtattacaagcggattttgtggtactttttcaacattatcctctgctatgatcgaattattcttttcatcattggatatgtttaatgggaaactacataataatggttatagagtaatgcaatttttttcaacttttataataacatttgcagtgccaattctaggacatgttttggggaaacattttgcagtatttttcgattggtttattgttccaaaactagctaaaatattaacatatagaaatataagagtgtttgaattgatattttccttactgggtatttttgctataatagcaaacatagtattatcatgtactttagatctctcatattggtataaacgaacgtattcattttcaatcttgatgggtgctttaggtacagtacttaggtttaaattatctgtgcttaatggaagatttattaaagaatggttcccaactggaactttaatagcaaacattgtaggatgtttgattattgcaattcttcaattgttaataaatggtttgaatgtaaataaaaggttattaattacaaatacgacacatcaatttatactgtttggattttcaaccggtttctgtggttcattgactacaatgtcttcacttgttaatgaattatataatttacagaatccattatttcaacatgcatatttttggtgtacatttgcaatatgtttcagtttgattttaataattgatggtagttatatttggactgttggtttccaaaattaatgagtagctttttatattaggattattttattaggaatattttattatttacattagtttataaaatttgtaatgatcggcatgaatattttgtataaaagaatcaagttttatggaaatcttaatcaaactggtagataaatttagtaccttttttaccctttttaactgcctttatactaactcccatttcgttcatattaaaggcatcgttactactacctaatgaagctgccgctgatgatgatgatgcactccaaacacctgaatcattattaacaggtttaacacgtggaataactttcttaggtggtgcatttggtaaacttgggaataatgttggatctacagctttacgtgcaacaggtgtactatatggcgatattatacttgttctatttgcagttgaagatgataataatgatgatgatgatgatgacgatgctgatgatgatgatgatgataatgaaggtgctaatgaagttgaagaatatgaaggtgttggaacttttccccattgatttttcgttttgttaccgctattatctgatattggattatatcccggaattgaatatccattggtgggaacatttgatgaaatacctctcgttttcaatgtcttgttttgttttattgttattttaggacctgatttattcttaatagatgatgaacctggtaattcggggaataatgcactattattcgaaaatttcttcaatttagaacttcccttggctttaggttgtgagtgattgatagttggatcccataatgatgcagatattgatgttcctggtaaagatgggaaattttcctctaatgcacgttggtttaactgtggttggtttattaattctaaatttttgcgtaattgagatttacttggatataatcctgataattcatagattaataaagtataatctacatctttactacctttaaaaatttgttgatacttattgttcacatcactagctgatatcaattctttactataatcatcatttaccttttggaattcagtaaatttgtctgcattatagttcaggtaatgcttagctctttcctctaaccttttccttttcaattcatagtttttctcggtatcattagcttgaacattttgagtatgtttcttttttgtattctttgaatttgaaacagtgaataattggttattaaaagtatttgtgctcaaaatattattaccatatatagctgaatgttcttgaactaaatgtgtttttaaagcaatttcatctgggaacacaacaaatttttgatctaaacatgattgaacattacaagtataatgagccgtttggaaatgttgatttaaatgatcataatttctaaaatattgtggattgcttggatcaatttgttgacaaatatgacatctttcatgactatctctcatatgaatgtataattcatcttctgaataaaatcttttattggtacaaaatttacattctggatgacccttgaaaccagctgagtcacccttagattgatgagcgtgaagttgtttcctattataaagtttcaattccggaatgaatgcctttttgaatttcacacataattcacaatagaatttaccgtgaacatctttaacgtgattgtttaattctttgaaattattcattctagttccttccatattacaattttttattggacatgtatactccatcaattttaaagtttcatcttttgcatattcactagtgaatctaataccgtaatcgtgttttgaaggtgagattaaatctttttgttttactgattcgtatttgttgatatctaagttatctgtaaatatgaattttgtagtttcagtacgacaaactaagcattgatttttcttataaagagcaatgtttctgaatgaacataaatgacaaacttcatgattacatggcgataaggaaatgattttagtattttctgcacaaatcaaacaggtatgatcattatcatcatcatgcactgatgaatctgaagattgatttgagtcagaggatccggatgaaaaagagggactcaattgtttgttatcattattattatgattcttattattgcttatccttgttctactaccactcattatcaatagatagttgcccaattcctaaattgaaaaacaaagtgaattaatcttattattataatcccaaaatcagaaagctaatggaatctgcaaacaaatcaaccttaaatttcttctatgtaaattcatgtagcaaataaatttccatttttttggtgtgaaattttcccactgaaaccgccaactgaaaaattgggtgcttcaccacgacgcgtctggttggtggtcaacgtcttttttttttccataatgatttgttcacattgcagtaattaatggattggagtgaatatgtagtcttaaggaaaggtgaattgaagataaaatagacaaaataattagtgaaaatgtcaggatttaacctaagtgcaacactcaatgttatgaaactagcagtttctccacaattatgtttacctcatctagtagtatcgacttttaacgatttacccgttccaattcctgcaaatccaacaattaaagcaatcgttctcgataaggataattgcttttgctaaggcacatgatgataaagtatggccagaatatcaatctaaatgggatcttttacggacacaatatcctggagcacaattgctcattgttagtaattccgctggtacaaatgatgatattgatcacaaacaggcacaaatcttggaagagagaacaggggtaactgtactccgtcatactactaaaaagccgggatgtcatgtggaaatcatgtcatatttcaaaaaacacggtgtttgtgagagatcagatgaagttgctgtagttggagatagattgtttactgatattttaatggcaaatatgatgggagcccgtggttgttgggtaagagatggtgtttcccaatcacaatccctgatctgtaagatagagagatggtggtatactacattcactgataaaaaatagtgtaaagaacaagaatagcaaaattttttcaaatagctgagccgcgtcatgaaacagggacatattggatttaaataaatcatggatcactaacattacaaattgaaccctaacaattggtaataatatactttactacttttattcttttctctatctctcttatttgatcaacaaaggagtcgtgtaactttccttttgattctttgctatgacaactcgtacattgggtaactttaaaactttacgagaaatacttgattttaacgatagactgaaccaaaatgaaattgaaactcaaattaatgaattaaatgaacgtgtagatgtaatgaatcccgataatcactttttgcgtggttactcaattaagaaaacttccattactagtgtattagattggaatgcagtatattcaaatgataaattattttcatgtattatggtacttttaataactgtagtatcacaattggttttcagttatatttcatttgcattagttaatgttcaacaaaatatggttttgttttattgttgtcaaggtttaaatttaattttctcttatcttattccattaactttaattcaagatattgaagaagtttttgaaaatccaacggttcaactagcatcagaaattcatatttataaacagttacgattttgttcttatgttcattctttatgctttgtggtatcattatgtacattggtatatttattcagaaatggaccatttattgaaatgagagttaatatcagagatatggttgaaactccaattgatatgactactttcattcggattttacaattaatatctttccaattaacgtcaataaacttaatattatctttgttgaatctttttttaacgagtagaaaaattagacattgttataataaaattgaaaggctgcaaaatcctcaagatatggatcttatgtttaacgcttccttagttgaaaacagattttctaatgatttattttgaaaaatgtatatttgtaacttatttatagtttacgggtatcttacacagctttttatataacctcgatctttactaaaaataagctttttgttacaaataaataattagaataaatgatttataaaatatgatagatgaaataaaataaaataaaataaaatttaataaaataaaatagtaaaataaaataaaactatggataggataaataaaaaatagataatacaatgaaacacaaaagtttacagatatgccatccagagagtatcggtacttgctaaattacgtggattaactgcatgagtaatcaaattaacaatgtattgacttgaaacagattgtgatgaactatcactagataattgactaattcttttaaccaagtaatcaacattaaatttaacaatttctcttaaattaggtggatcttgtgtgacatatctggttctttgagcataccatgaaaggatatcatccttaataaacaagttcataaaatgctcaatttcatattctggattggacaaacattgagcaataatcatcatatgcatagagaatataccttcagatcctattgggccaattaattcttgaatattcggagttaatctaaatggaactaattctaatgaacaaaacattggagctgctctctgtgcagaaacatctaaattactagtttggaatatattatgtggcgatttacctgcaacgactttatatggtaacatttcagatgtccaaactctacctgagctttgattaatatgaattttttgtggttgtcttgcattaatacataacatgtaagtagaaaatgcaaatgtagcatattgtgagctaaattgcttacggaaaatccagaaatcttcaaatttaggataatagttgaggaaatagttctttaaaactgaatttggaacaaataatgtttgaattgcagataaaatttcagttttaacacttaaaacatctggttttggcagtcttggatcatatgctgtatgtaatttttcaattgtataagctaatggttcatccctgttttgacctttatatttacagtatttttcgtaaatattcaacatattaacatatttgtcatcatcagtcattaatctgatatgtggcgataaaggaattgcacatggtaaagtaaattcaatatttctttttctactttgaacatttttacttaatggatcattaaataatctgaataattgaaatattctctcttctcttctacaatgtcttgcagctggaaattgaatagcaaatttatggagactaccatcgttacctctcattgtaatacgcttgtaaaatgctgtaggacctctaatcatatcaattgtaggcataaatctttcaatcttaacaaaatattggttactttccttatttaacaagtattgaccaggtatttcaatatcttcaaacttttgatgatggaattgactcaaatgtggacaaactctctctaaattgaccttactatatgttctatcaagcttctcttcaagacaatctttccacttccttagtttggaaatgtaagtttccaagtttggttgactcttgattaaatcaatttcaaactcttctttaatgtgttttggtagaacagtattagcaaatctaacaatattagcttcggtggctggtggtaatctagcatcttcattaggattgggtaatctattgaaatattgaacaccgtcattataaagtgcaacaactaacctataagcatctccgtctgaatttgatttgaatctttgactgatttgatcaaccaaggattctaaagataaagcaagtaatggatatgatgttttcaaaattcccataatttcatccaggtgaacccaaggtttagcaaaagattggttaatattagaatttaaggaaacgactgaggatccattaggtgggctgcccgctaatggagtaccagcaagtggatttgagttaacattctcagtttgagctttggcatttgctgttcctgctgctccattatctggaagagtagctgaagctgtagtatctgctacagctttaccatctttattgtcaacattggtatttgaggaatccaatttgttatcatcttcttttttaccatcagttgcaccgccatttgtataagtaacaggattgtttgatgcggctggtgtctggttattggcaggagtgccagattgtccagattgtccagattcagctaattgttgtctctgtaatacacttgcatcttctctagcagttcttaattggaaatgtaatgattgtgggtattccttggcaattttaattaataccttacgtgcaaaatttgcttctttatgagataaagcagataagagttgtggaataaatgtaatccagtaccaaattggcatatcactttgatgtgattcaaatgattctgtcaaaacaccattatcatcatccaaactaatcaaccataaaattctacataataaacgacgagccttgctattcttatataagcttgtagcttgtaaataacaactgatggcatgtttagcataattaatatcattggactccttaaatcttttatcattgaagaaaccccattcagcccatgcctttggtaaattcaaatccaattgaacggcagttgcaaaagcttgattggcttcatcgggtgcattaagtttcgccaaaaacataccttttagtgtgatgaattcagctttttgttgagcggcaaagtaaaccaaattagtattagaaataacatctaaaccggtattaagttctgcaggattttgataatggcatttagcttgttctcttaatttcaaaaatgcttcttgaatttcaatatttggtaaggtgtaaattttagttaattgattaatacagacatctggcatattatgttttctagcaacgtgagcaaatctgttgataacccaagcaatttcatgatagcctcggaaagcatatgagttgttattattattggtttgttgaatagtaggaatcaatggaatatagactttattgatgacttcaaatgagtgttttctccaggtcactaaatcattccaaatgttgatatcatcccaagtgtttggcatacgttctctccatgcttgtaagactcttttcaaatcttgtgatttcatgtccaagttttcagcagttgttgaacttaaacttctataaacttgtgttgcttccataaactcaacatattgttgaaaactatgtaagagtggaatatgtgcattggttactctttgtggtaaagtgtaccattttttcaaagataattgtataccttcatcaacttgtctagtcacattttgaatagtttctgaattatgagcataaccttgtaagctgaggaaagcattaaacatttgtcttctaggtgtaggaacatctaaaacagttttgatagattgttcaagtggttctctatcagtaatccaatcagccactctccaaccacattctaataataaatcagtaaaaccttcattctttgcaagctctgttaaaatatcccagcattgtaatttttcagcacataagatccagttatcttcccataaagcatattcactctcactgtaaggtaagatactacttctagctttgacctgtgcagtttcataaagtttcatagcacgatcccagaggccaatctgttcgtatgataatgcagcattagtttcaaaatacttagaacgtctacgccataaaccataaaacatatctgtttcttgtaagttggcataaagctctactaaagcatccttatttgtttctttaattttggagttttcagttaatggatttgattcaatttgttctaaaattctaacactggagtaccatgtgtcataattaatacccaaatactttactaagtgtggaggaagttgtaaatccgtacattttccagcagcagtaagcatggtgttaataacattaggttttccttcttgttgtcttgtgtggtaatcttttgataataatgtaacaaatgcatataagaagtcggacttttctttttgctcaattgaattgtaaacaatagggaataaagtgcaccatgaattatggatggcttcaggactttgatataaaagatccaataatggaactaaaaggtcagaactcttcaccttaattttatcatttaaaaatttctcgtgtttggataaaaggtctgaaatactagatgttgtttcttcaatcttggtatcaagtggaacataataaatttctgttagtttagctaaagtattctcattttcagtcaatcttaaattataattcatatcaaatgatccatataaaatctgagaagcttgatttagccatggatattctgataaatactcccaattttgttccctaataatataaaataatcttgttttaatatctttatccaacgaattattcaaaattgaaatcaaatcttgtctaatcttaacatcagatattttagtaccaaccagaaatggatgttctaatctaaaagtaagctcactgtaatttaatgattcatctttgaaaatgtccatgatgatctgatagtacattttggtcaattcagaatcacccttcagttcataaatcatcatttttgaaagaacacctgctttttcctttacggtaggaacagttgatgaagagtttgaaaacaaccaacttcttacaatattcacaattgtggttaaaatatccctgtcaacagatttatcaattaactgaactaagacagataagtaaattcttctttggtcacccaacgccaacatacgctcagagccaaaatttaatatcttttccaccaatttagtagtcattttagcttcatattccgtaccattcggattttcaccattcagtttatgtttaccgtgagatgaaagagtaacatgatccttgactaattttcccagtgtttttaagattaattgaatgtgaggatctagtaattctggtttgtacttagcaacgctagataataaaagaacgccagcagcgactgtattcattgcagttaaatcttctgcaaccacagaaaccaaaaagttcatgaactttgtacagtcattttcaggagcatcttcatcgacgatgctagtttcctcgatttgtactgcctgtaagattaacaataaaacactttgtaaagcctcttgaatatcatgattgtttgatttgatacacttttccaataaagtttgaagttctgcaatgttagcaacaatccaatctgaggttttccactctaaattgatatccaatacctctaaagcatttaaacaataaaccaacatgttgctgacattagaatctgaatttaccaaaaacttttcaaaaaatgaaagtttaacattgacgtcaggccaaaagccaggagattgaatgatatgtaaaatattaagagaacgacgacctagctcattttcagaagctctttgagaacagatacaaacgtaacgaatcaaaaatgtaatataagtttcccttaatccaaatggaactgagtaagaggaaaccatgaccttttcttgagcttcatttttagggactcttggttcatcaacttccatttcatctgaattattgtcattatcagcttgttcgggttttttagtttcatgattctcatctttttcatcttttgcattatcatcatcagcagaattaacattatctgcgttatcaacatccatcttatcagaatcatcggcatcatcagcttttccaggaacaacagcgttctcaacagaatgtgatgaactatctttgacagttgattgtttaccattctcaacctttggaacttcagattcttctttacttttgacttcccagtttaatattaactctgctaaatcgattgctaacatttggttttcatttgctgagttatttacaacagttaattttcccattgcaccaataatatttggaatgaactgatctcttgaagaatagaataagtctgggtgactaacaataaattgataaatattggaaacatgactaacagaatatccatcttcagacaaaactcttctggtccaatttaaccattcagtattaccatcaagtttatcattcaaaaatggtgctaataaatcaatcgattgtctaaccataaatctaatatcattttgatttgctttcaataatgcaacaaacacttgtataacaactttctttggagtatcaaatgctctaataaaatagacgattgaaatataagcagcttgtttggaaatactatcttccaaactgatgaagctccaattgaatttgatgatttcttttttccacttgattattaagtcagaatactcagagagtaataatgatgttaactgtaataattcaactctaaatttatcaaccatacaggattcaatcttagatgattcttcaacaatccaaaatgtattagctaaagcgcttaaccagtttgcaggatcttcaccaacttttgcaagttctttagttttaccaactttggcattatagtaacaaagtggaattgcaatctttttaagtaaatatattttagtagacaattggcgggatttatcagaaacaaaattcataatttcatcaaggtaacgtctagcgatttcaagattttcagttttaataatatcttccaaaacaaattttgaaacattctcagtgacttgaattttatttaaacaaattatatccaataatgtgatggtattagctaaagattttttgttgagttttaaataattaacataaattctttcatatttttcaactgattgtggaagttggaaatgaattggagatgatattggtgaggatttttcatattctatccattcaatcattaatgagctagtttgttttaaaataggttcgcaggttgaataccagtttgaatcataaacagacagcatctcaattgagtcaataaaattggttaacatgatatacttggtatctttattttgttctttattaattaaatccataaaatcatcaacatgtttcttaaattcgtttcttaaattctcgcaatcctctgatccaataaagtatacaaatatggatccataatttctaaatactaaatgttccttcataaactcaatagattgatctgaaaaacgattcaaaaattgtgcaattggttttctgaatggtgagttataatgacgacgtaagttgctttcaagaaataataaagtttcaatcaattctttgaggaaagtatgtgcttgtggtggtaataaatggaaaattttaagaatagaaacaattatttgaattgtattgttactatcaagttcttgtaaagaagctctttgcaaaactgaaggttgagcccatgccataagatgatctaataattttctaccaatttcgactttaaaatatgaaatgagaagttcaagtaatttagatagtgcttccagacctggagcggtcagtttcttgtaatcagataaattcatcaacattggacgtaatccactttgtaataattcctttggtaattttgaattttgtgaaagaacttgtttcaaacctaaatatgcagcattaataattttagagctacttgaacatagcgttttaaagaaaacacttaggattctaattctaacttgactattcgaaaattcctttttagccagtgccaaggccaataactcaatgcatacaattcttaaatcaattaattgcttggatgtggtatattccgcaatattgttggagtttatcaatgattcatcatctgcatcaaccagtgccattgcttctgatagtaatctattgagttcatcattgaattctaaaaatgtatcttccaaacctaagcaaaatgtgattgcatcaatattaccaatttgcatatgaaatggcaatgctctcaatggtttaccaaaaattggagccaataaaatacctttacttggtgaaatcatttttgcaattggaacagaagtaacttctgataaaattttaatagcttccttggctgtttctctaacattattgttagaattacttaaatcaaaaacaatttgactgacaatagattggaaagattgttggaaaacttgatcctttgaaacttctttattacaattttttaatatacccaaaataatatctttagcaactgtgcaaacttcagcaggaacatcatctggtgtatctctcaaaacaaaaaacatagctcttgaaatttcaatctgtctaacagcaaaataatttggagaaattcctaaatcattaatcattgtttgcaaacctaaacaaccacccaatttatcataatatttatcttcaaaacaattatgaataaaagtggagcacattcttctaatagccataaattttaatgcattgtcaacagaaccaaaaagcgtgacacatgtattgaaaattgccttgatagcaaatttacctgcatctcggatatcagacatataatgacttaaagcataggaaatagcttcataaatagtgtttgcgttcaaatatttgataccttcatggttagcaatggaaaattgtctggataatttgttatgttcgagcattgctttacttaaactcaataaaacataatgttgacaaataccttcaattaatgcataagattcaacttttgcatcttcgattgaaacggaaaaaaataatgcttttaataatctaacaagtaattcctcttgtttttcaaccttttcatgatctttcgagtcatctaatggtaaactaatactattatgatcaataggaactttaccatctttaataatgaaatcaacaacttgttcaaccttctcttgataattttcaggaattccatcagtactaatcattaattttaagattgtcattagatagttattagcactcattctataatggtttttataacggaaactttctaatgtaagaaatgcagtgttcattgctgatgtaatagatataggtatatcaccttttaaaccctcaattttgaaaaatgcttctaatttttgatctgttaacgtttcagatgtaagatctctatgtaaattcatgaaacttctgtttctaccacctaatttacctaaaattctcaatgttgtatgtgaatgttgatgataatatggtaaaggctttaaatgtttccaaagtgctttcataatatcttcaatgactggttctataattggatcaaaataatcagcggttaaattatcaacgcataactctaatgttcttaaaccttgagttattaaatcttggttaccatttaatgcaaatactaaaggtttcatcaaaaagcttaaatatggaaccaaaacacttaatctaaccggaactgttaaacataattcaacgtaaatatccctttcatgtgaacgacgtgagctttcaattaatctattgagagattcaagtaaaacttgtaacaatggtaatatttctttgtaaagtgattcaaatctaccacctccaatacttctgaacagagttctaatcaaataaaagtaaattattggttctttcgttttcattgaatatttcaaacaatctaaaatcagcttattaagatgaggtaagataacattttcattaacatttgggaataaattcactgacatgaaacataatttgaataatctgatcaaaatatttgatttcactatatccatatcacctaattcgtttaatttagagataacaaatacaatcaatgtacttgaaatattagatgttgtaatttcacttgctaaaaaaaattgtggaatgtggagtaaagctggattttgtaaagttaattcaaacaatgctggtaattgctgttgcataatttcattaaaagctgcaggttctaaatatataaagatggttgctaaaatttccatcaaatctttttcttcctttgaggaggttataggtaagttaggaccagtaatatcaaatgattgttttaatgttgatgtaatagcagtaattttagaactttggaaaaacttcaatccaccaatggattctttaaataatttttgaaaaatgtttaattcctcgattgaggttaaacgagcactttcttgccaaacttgtggaggataatcctttgggggttgtgtattacaacttttaaatccaaaacaaatagatttaaggaaagtcattaaggttctaaataaataacgtgcactttctaatggatcttgagtttgtggttgaatgatttgaattggtaagtttctttcaatttcagcataagatatattggttactaaatcagtttcttctgttttttcagtagttgattcgtttggtttatcatctaagtgaagtttttcagataagtttctaatatgataattttcgtcaattgattttccagtcaatgttttaccaaaagtttctaatttttgtaatttcaatgcacgttcttttctactatttttgaattcatcgtgttgtttcataatattattgtattgtgaattcaatgatgcaaaccttcttccaaatgtatcaattattaataataagatttgtcgtgagtcagacttattttccaattttaaaattctatccattaaatttaacaataatttggcactcattatatgaacagtttgtgctaatgtatcatcttgtaaatatccactatatgtttttacactcttccaaatttgatctattgtcaatgacgtgttaacgtgtataaaatctgcaactatagaatatgcaagaggtcttaaagtttcatgtgcagttaaaccatcaccaataagtatattgtcatcaaatagtaaatcgatcttaggaacaaataaagttcttaaattagttgatagaacgtgtctggtagcatgtagtagttctcttctagcagttgataattctcttggacaatcttgtaaaagtcttataatcaaatctggaatttcttgttggtattgttctatattcgttgaagaattttttctgataaaaatgtaagccatgaatgatgatgctttgacttgagcaaagttgaaatcattatatattggatttttgtgtaaagatggagcaattttaacaatatttgtatttgcttcctttgatttttcatgttcaagtttttgagctggagcttgtaattttaaaacatcaatgacaagtggtaaaatagttgaaacagatgtatctaataaagtcttgtaagttccagataatgaaacaagagtaatgggacattcagctgccattttaaaagagtgtgttgctttaaataatgtttgttgtgaaacagaatcatcatttgttgtaaaatcagtgaatgatgaaacagtattatttggtttttccaattcatctgctttttcagtattttcagttttagtttcatctggcttatctgaaacgactatcttttcaacttcttcgctgacttcatttgtatctgatttttcttcagttttaaaatcatctttggaatctgattttgcatcttcattaaatggttgagaagctgtatttgaatcacctttatttaaactgaattgttcatcaacaagagttgataaattagaataaattgctttaagaatacttaaataatcttcaacttttgatgaaagataattcttataagatttatgtaaagaagttataattttcatacattgtaaaccattttcttcattgtcaatttttaaaagttccattaaactatcacaaactctaacagcataagggtggaaagtttcattatatggtaatctatgaataatatcaagaatcaaatatcttaatttttgttcggctgaatttgagataaatgaaattggaattgtatttaaatgattgaaaaatatatcaatcataacttttaggaaatactcatattcttttgcaccatgatgtgtttctaaagtatcacaaagttcagaaaataaagtatgtttaagttgtaaatccaacgatgcgtcttgaagcttttgaacaaatgcatcaagatgttcagtataggacgacatttttagtattattggattctgataattaacctaaataaaatttgaatgtttgactttagaactaattatcttttaaaatgtgtctatatgtagatacttttggtatttaatgcagaaggaagggatataaaggatatatttaatgggaagcaaagattataaacaattaattaaaaacagtagaaaacattgaaaatccatgttgtgaaaattcatattatacttcacgtaattcagattttttttccttgagggggggatacttcaccaaaattttcaaatttgatcacgtgacgtggtttttgcggtgggacctatttggccttgattgatcaggtgtgcttcccatagtcgtgaatagtcgtataacaaggagtggaagtcactattagagacttttttggttgatgtcgtaccttcaaacaaaatattccaataataacttggtggttgatataaagctggactttgttcacttgttggtacagtttgatcagaaaaagagtatggttgtggtaaagcgagtttaggttggttttccttattaccttgtgatgaaagagttgcagaatttgaatcatagattacagaatttggtgagatatcaagtggaaaatatcttttacttttatatgggattttagaaagtggtactcttaatgagctagtcttgaaggtaaattcttcattctcagatttggctcccactattttactgttacttttaatactgatatttctacttttaggtacaatttcattatcatttgaaatggatcttttggagaaaatgccgcctctatttgagagtcgagttttccctagcttcatggaaggtggatatttaaaagttgaacttgttgatgatttattgttcatcatatttctttttggtcttggagaatcttgatttatgctaaaatcactcatcataggcttatttggtgccattgactttttttcagtataatttggtatatcagttgtggtctctttattggatgtaacgttcttttttatatgttttaaagcatctttataagtttccaaccattcagtagactctttaggttcattttgtacaacaatatttgactttttgagattatgatttagttcatctacagtatttgtttttgcttttgctttatcaaaaatatcttcaaccgattcagcttctggaccagtggttaacgacaacctttttaatgtatcaataaatgtttcggtctcttttgtttcttgatttacaaatttgatagtagtaccattcaaatcatttgatgtatcaggtgtgggttcaattttatttgaaaaagtattgtagtctatctcacctgattttataaaccattttcccattttaggtacataagagtttaagtattttctatctagggaagaggtatttgttgattctgtatttgaaatactggatgaatctaataaattactacttgtctcaccggaactcaatttaggattacaaaacatactttcggtaaaagtttcggatatggtatgatggtgttagtaaatttgtagttttagccattggtatgacttttgatacgatttcttcgtacgatttacctacgtcacctttattagataatacaatatcgttaactagatccggaaaggagaaatctggttcattaatttgcttttctttgacaatattgtatacaaactcaataacagcttgaaatgatttgttgatacgacttttacaaatatcatcatcatcatcatcatcatcacaactttcaaatgcttcaatctctaaatcgattttcctctgatttactaagtctataaaaggtctcagaataggatccaagagtggatcttgatctacctcatttgctgccattaattataattactttttaagctaataatgaaacaaatattcaaataaaaaagagttcggcagttgctcccattctataaagaaatatccaagttgccctactttataattagtttactccgaaatccgagattttaacaccatgcgccacaataatagcaatcatgcgccaccaacattcaaaatttgaggaaaaaaaaatatttcacttttcacacttcacattaatctttacatcaaatttttttttttgaaattttccattgattcttagggaatattcgattgtatcgtaaaatttgttttcattgaacaattaagcaataaaacaatatgggtaaagctaagaaaacaagaaaggtctcggtgaaaagaatggtcaaaaaggatgatcaaagaataaagaaaaatatggataaaccaaaagaggtagaggaagataaagaattagttaaatcagttccacaagtttcatctgcattatttttccaatttaatcaagcaattaaacctccatatcaaattataattgatacaaatttctttaattttagtattcaaaagaaaattgatatagttagaggtatgatggattgtttattagcaaaatgtataccaatggttacagattgtgttctagcagaattggagaaattaggtcatcgttatagaattgctttaacattagcaaaagatccaagaattcaaagattaaaatgttctcataaaggtacttatgcagatgattgtatcgtaagtagagttattcaaaataaatgttatataattgcaactaacgatgctgatttaaagagaagaattaggaaagtacctggtattcccaataatgagtgttggtggtcattcatacgtaattgaaagattacctgatgtcttttaaattcttctcctttgctatgtccttatatatttgtgcatgtataatacctttttccaataagtactattaataaatttgtaatactggtctttaaatcatctacatgaatatctgtttatgtattaaccctgcatatcgtttgatttactaataggattggaattaaggatcagatttggcattgattcgctacgtaataacacatctcttaaatttcaaccttttggttttatatctcttaatccatcatcctcttcttcaagcaacaaatgactagtgatgataactggaaccctgatgaaaaatcagatgtaggggatttgaataatttcaccaatgttgcaaatcccgtaaatccacctaattcatcatccaattcgaatgttcaaaataaatcaacgccaccaccacctccgccaccacgtcatacaactgatactaatattataccaaatgcaccacccgaatatgtatcattcaacgacaatggattcagtaatgatactggtatgaatattaatttagataaggatataagggataaaatatctcgatttagtaattatggtcaaggtacaatgacttatgatgataattcagaaactccatattattcatacaatgataatgacaatgtaaatactcttgatcaaccaacggaagactatgaaagaaaatatgaagagaactacatttataatgaaaataaagttgatatttatacagacattgaaaaaatgattaaaactagtccctttggtatagataatatagatgaagataatgaagaacaagatgacaaagatgtaagcgttttattaccattacgatatgatttatatgaatcatattttgcaccattattaatgattttttctcaaattcctgaattttctaatataattttacatcatgaatatttaacattcccatataaacctaattggtggaatcgtgaattatgttctgaaaatccattatttgtgcaagaattacaaagattagttgcattcctcaatggagattctaaaagaagatttgcttcactttttaatctaattaaaccatttgaaaaattagttaaagatgaatttgaatcaattgatgaatttgttggttttgcaataaatgaaattgttgaattaatttcatcaattgagtatagttcaaaagatccaattaaacagttatttgcttcaacatgtattcaaaataatgacttagctaataaacgtgatatttacgatataccatttaatagtgatgaattatgctataatatttatcaaacggtttataataaattgaatacggatgaagatgttgtttatttgagtaatgtttccgatatattgacattttcatttgaatcagatactaaaaccatagaagaaggattttcattagaagaatttatatttccacaaatttttttgtatgaaaatagagatgttttcatgtcaatagataataaaattgaagagttaaggatgaaaaataaagaattgctggataaatcatttaaaatgagagcatttaatggtaagagtattcgtggtatattaactgaaaccaaaaaatatttacataatgaatcagagaaatttaaagtgttaaaagatggtgataatgatgatgatactgagatgaaagatgcagattccactaataaatcaactgaattgaaagattatgaaaaatatgaatctgctagtgaaaatattggatcattagcaacaaatatacaacagcttataacacaaataactgaagagactaataacatacaaagaaatatatctaatttaaaatcaaaaaaatttgaaattgatgaaatacttaatgaagaacaaaaatctacatttgaaccatggatattaacaggtataattattaatccagcagtgttttgttacagagagaaaaaatcaaataattggataagtgttggaattaatcaagatacatgtaaagattattatacttcagaaattgaattaagtgaaattcaacaaatgatgcaagaatatacatcaaagaatctagatgatggatttattttgacatatgttagaaaatctgttttctttgattgtgaatttaatccattgaataagttattagaggaattcatcaacaaagataatgcacatttacagaagcagtttgatatcatgaaaggtggtgtatagagagtaatattatgtaagataaaacgtattacgtaatatatttctaaataaagactaaatcgaccccccccccagtgcttacgtaattggcatttgaaaattttacaccagtgcaccgggttatattttaaacattaacaataaaaaagaagtggcacaactatcgtggtgtcagggtacatgttagttatgccaacattactaggggtgaaagtgaggaaaataacgtaatacaataaatagtaataggaaaaacagccttctaatgggttctattccaaattttcaattactgagggaatattcgttaaatttttcatgatgttgtaacattggtggattttatgatatattttcaatttagagtatagaattagatttttcaacttatttttcacttaattaatcagataaagatggcttcacgtgtatttgctaatgcattaagaaccttcaacagattatctgttgcaagtgttcctagaattgcaccaagaactgctgttagatttgcatcatttgatagatctaaacctcatgttaatattggtacaattggtcatgttgatcatggtaaaactactttaactgctgcaattactaaagttttatctgaaaatggtggtgcagatttccttgattatgcagctattgataaagcaccagaagagagagcaagaggtattacaatttctactgctcatgttgaatatgaaactgcaaatagacattattcacatgttgattgtccaggacatcaagattatattaaaaatatgattactggtgcagctcaaatggatggtgcaattattgttgttgcagcaactgatggtcaaatgcctcaaactaaggaacatttattattagcaagacaagttggtgttcaacatttagttgttttcgttaataaatgtgatacaattgatgatccagaaatgttagaattagttgaaatggaaatgagagaattattatctgaatatggttttgatggtgataatacaccagttattatgggttctgcattaatggcattagaagataaaaaacctgaagttggtaaagattcaattcttaaattaatggaatctgttgatagttggattccaactcctcaaagagatttagaaaaaccattccttttaccaattgatgaagttttctcaatttctggtagaggtaccgttgtttcaggtactgttgaaagaggtactttaaagaagggtgaagaagttgaaattgttggtggtaaagatggtgcattaaagacaactgttacaggtattgaaatgtatcataaagaattagatcaagcacaagcaggtgatactccaggtattttattaagaggtgttaaaagagaacaaattaagagaggtcaaattttagcaaagccaggttctgttaaagcttataaacaattcttagcttcattatatattttaactaaggaagaaggtggtagacatactccattctctgaaaattatagaccacaaatgtacattagaactactaatgttaacgttaccttaaaattcccagaaactgaagaagatcattctaaacaagttgcaccaggtgataatattgaaatgattgttgaattattataccctgttgtcttagaagttggacaaagattcaatttaagagaatctggtaaaactgttggtactggtatgattactagagtttacgaagagtaaatcaattgttagtactattggtaattaatattaaattaattcatttaagtttataataaatatcatgtttatagttcaaatttattaacttattattctgtttttacgtaatactagaaagtttattattccgtaatcacaaataaatgacattggatgtagatatcggatgttgagaattttacggcgataagagacctattaactccacaccactaaacccttgaaaaaaaaagggttcgcgaagaggagaaaaaaggcttagtcaaagatgggggagaagtcttgattattagtttttcctggggaattagtatagtttcgaattccggggtaatactcgtttccccaatcctaatatggagcaatcatgcacaaatttatatttctgacatgattattagtaatgttcataaagtttatttagctaagtatatttggttgtgtcaaatggtcccgggcaatgaataagaccatatcaaagttattttatgaatacttgataagtttttatgactaagcagtaaaagataaactctgtagagcatttaccccaggtgtaaaataaaaatcgtactagtattaaaactaataataatgccttagatataaaaaattgggggataattaaaaaatagcaaagaccggaaacaaaaaatagaaaaaaaataaaaaaataaaaaattatgtaaaaaagaaaagtggaaaaaaggaaaaaaggaaaaaaggaaaaatagttctcgcccgctaaaaaattctctttgtttagtgtagtatgtatccaattggctgtaaataataaatttgtgggttagtaaacttttaggttaaagttttcccctcaaaaaaaaaaatagagtgcgttaataggctacagtcttttaaatggggatagatattagtatacaaggagaaatatacgtatgaagacggatgagcacaacgttacagagtatattttttagcggagattactgataataatgtataaatggtatgttcttgttattactaaaggagatagtaatgttaatctagagataccaaatgaagtaaaatatttattcaaataaaaagcaacatgattattaagaaacaccccataatttttaatttttaaaaaataaacactgttttaaacgacgaaaagtggggtttttccgattttccgggatttgaaagcagaaatttatagtgtgcggattaatatttattgggtgattttgagaaaactatgatgaaatgcttacaaaacacggaaaaaataggaaaattattgcgaaaacaacgccgttccacgcttttcctgtttctttttaaatgacttttattgttttttttccagtctctcactttaactcggatgacagaaaagagaggtctccatttctactatataacattttttttcctgttttcattctgtttatcctataaattaaactactttcccacatttttcattttccccaacttctccatttctgtttcttttcctttatccctctctcttttatttcttttaacatcaaacaaacaaaaaaaactcttacttataattaaattaaatatttctaaagatgtcatctcattcatctattggaaaattatctcaccaatcttttgctggtgatcatacaaacactccagaagaacaacaaccagaagttgttgatcaaaatcaagatgccccaattattcctgatgaaccaaacgctaaatatattgttgctgcaatcttatgtttattaattgcattcggtggtttcgtctttggttgggatactggtactatttcaggtttcgttaatatgcctgtttttcattgacactttcggtcaaattaatagtgaaggtgttacgttatttatcaaaggctagaactggtttaatggtttctattttcaatatcggttgtgcaattggtggtattactttaggtaaaactgctgatatttatggtagaaagaaaggtttaatgattactatggttgtctatattgttggtattgtcattcaaattgcttctgttaaatcttgggttcaatatttcattggtagaattatttccggtttggctgttggttctatttctgttttagctccaatgtttatttctgaaacttctccaaaggcaattagaggttctttagtctcaatgtatcaattaatgattactttaggtatcttcttaggttattgtactacttatggtactttccacggttatgatgattcaagacaatggagaattccattaggtttatcttttgcttgggctttattaatgattcttggtatggttttcactccagaatctccaagatttttaattgaagttggtagacttgatgaagcaagacaatctttagcatctgttaataaacaagcaattgatagtgcctttgttactcatgaattagaaactttagttaatgcaattgaatatgaacaagctgaaggtaatgcaagttggggtgaattattcactggtcaaccaaagattttctacagattaatcgttggtgttgttttacaatcactgcaacaattaactggtaataattatttcttctattatggtactactattttccaatctgttggtttagaagattcatttgaaacttcaattgttttaggtgttattaactttgcttccactttccttgctttatgggttgttgaccgttttggtagaagaaagactttaatgggtggttctactggtatgttattatgtttagtcattttcgcttcaattggtgttaaaaacttatatgttgatggttatggtagtgaatcaagaaaaccagttggtgatgctatgattttcttagcttgtttcttcatcttcttctttgcaactacatggggtccatgtgtcttcgtcgttgtctctgaaacttatccattaagaattagatcaaagggtatggctattgcaactgcagcaaactggatttggggtttcttaattgctttcttcactccatttattactgatgcaattcattttgcttacggttatgtctttttcggttgtgttgttttctcattattctttgtctttgcattcgttccggaaactaaaggtttaagtttagaagatgttgataaactgtaccaaaactataccccaggtttagcttttatgaaaaaattcagtaaaggaactgtcgatgaattagatgctgatactgaaaagaacgcaagttcataatttcaatataccccaataattttacaaaattgtaatgaaaactcttgtttttgtcctcatgaataatgattaaatttatcttcatttacttttaatatataaactatatatgatacatataacttttttaatgattttagcatttactttcttttactttactatctttctatagaaaagaatttaaaaaatcaatctctaatttggtaaactttttaaaaataaaaatagttcgatctaactttatcttatctgaacaatattttctgaaaaataaatcgagtctttccttatcattgatacatgcattatcataccattcggaagtattttgatcaatccatttaacataaacttctctagtaaacttatcaacattagaccccctactattttctctcattgcattcaaactagcttctctaaatccatggaaacatggagttaatgaaacaattatatcaaacatatcaccggaattttcagctagattcattaactcatttgtataaagtgtacattcttttgatggcttaatgttttcaatatattcatctgtaaaaccaagttgtgataaaatattcttatgacgtttgatttcaacaaatgtatcatttaatatctttacactatcctccatttcaataatattatgacttttggaagctaatttcaaaataacattggcatatcgttgtaaataaatataattttgttctgcaaatcttttaaaattatcaagtggtaacttaaaattataaaccattttcatgaaatcatgattcgtatagctgttccaatgatctttcacctctggatgattcactaaatattctagtgcttcacctgttttaaatggtaattcaaatttactagatgacatataattacactgtttcatgttttggatatgatttattggcccgtgcccatttccaatattaggagctgtctttataccattctgtacgtagacaataccatttgcaacagagtttataattgataaaccatttgacaagttagatgcaatggcagatgataaagtacatcctgtaccgtgtgtatttttagaatttatcatttcagatttaaatactgtaaatgaattactatctgaacaataaagtacatcagttaataaatttgaatctttccagttttgatgtccacctttgattaagatgttactaatgcctgtcttggcgtatattttcaaacacatatcataaatttcttcaattttatcaatatcgttacttttatcatataattgttggtcatataaagtattcagcagacactttgcttcaaccatgttcggagttaacaatgttatgaatggggataacgttttaaccaataattttaatactgaattgtttataaaatcaaatcctgatgtactaaccataacaggatcaacaactaaataacctttatattcaaattgtaaaatggcatttttcaattccacaattgcatcttcagtcaataatcctgtttttattgcaccaattgaaatatccgtaaagttttcacttaacatatttctaaccatttctttcgtagttggagctgcattaataacacccattgtattctgtgccgttaaagatacaatcgtagtcaatgcataacatttatgtgcactaattgtcttaatatctgcctcaattccggcacccccggaagaatctgatcctgcaactgttagtaccgtattcaatttatttgactctgatattggtgtaattgactcgttatatgaatcatcataaagatgaatttctctagttgtatatttaacatccataattggatcaattgtacacgatgtatgtgattaaagaaatgaattaataacatatgaatcatcggtcgattgagtcaatgttaaagtttcatcaagactctgctgttacttaatataataccgcaattttcaacaaatgttacattgtaaaatataattacatcttttcttttggcaaagatgacaattgataaatctaaaattgattattcgttatatttagtcaccaacaatgagatggttcctgagggactagatatttatactcaagttgaaaaatcattgaaaaacggcgttactattgtccaattaagagaaaaagacttggatactggtgaatttatcaaaagagcagaaaaaatacatcaactaacaaagaagtacaatgttccacttataattaatgatcgtattgatgttgcattagcaattgacgctgaaggtgttcatgttggtcaagatgatatggacccggcattagttagaaaaatgattggaaatgataaaattttaggtgtaagtacacgttgtgaagaagaattaatgggtgttattaactcagaagcgttaattgattacgttggtattggaacagtgtattccacaaagactaagaatgttaaaagaccgccattgaatattggtggtctccaaaatttactgaagttcatctcaaaacgtaaaccgcaattaagaagtgtcatcatcggtgggcttaacaaaaccaacattccaatcacgttagctaattgtgcatacaaaggttttaacactgatggtgtagctgttgtctcttgtattatggcccaatcggatgctgcattggaaacaaaagaaactttaatagcagttaaattaggttttggaaaagtcactcctggatatagacacaatgaatcaaaagtttccatggttcattttataaccaatggtgttgttaaaaacatgtctgcaaatgtttgtattgcagttggtggctcaccaatcatgtctgaactttcagaagaatttgatgagtttgcaaaatttcctaatatcggacttgttttaaatacgggtactccaacatcttcaactgttgatatgtatattgatgcaattaaggcatataataagaatatgagaccaatagtttatgatcctgtgggatgtggtgcaagtaaggctagacgtgatataatgaataaacttttgaatgttggttctttcactgttattaagggaaatatgtctgagatatgttgtgttgccggagttgatggtagtagtatgcgtggtgtggattcaactatggatttagatatcgaaagttctgttgaaatcttgtctaaattggcaagagagagaaagtgtgtggtagttatgaccggtaaaattgatatcattgttgatggtattacaccaagggaaacattaaattattgtataataaaagggggtgatgactacatgtcaaaaataactggctctgggtgctcacttggtggtgtcattgcaactctaatatcatcaacttcctatttcaatgcatatgaagcaacaatacgagcagtttctatgtataaagaagccggttttattgcatcaaagcaaagtaaaggacctggaagttttaatgttaatttcattgatgctctttatgaaatttcaaagagtaaagaatttagttcaacaactatatcacgttattagttaaatgtttatataaaaatcatttcacaaaagctagtgtacaaaaaagaataatattaatattgatcaactagaaaggaagttttgtttgatttttactaaactttttggaagttttagcagaactccgaccttttttgagtaatttttcaccataactttcttcaaactctttatttagttttgtttctaacgccatggctaaatggaaatctttgtgtgtttgaaaatcttcagatggtataaattcatcacaatcgggacattttgtatttgtaatatcacttgatgtttcctctgatggtagattttcatcagagttattcaaagtacttgattgatcggatgaaggtttcttctctgtaaggagagtatctatagtatattttttctttttgggtataggtaatggtgggggtgaagatggtacatttctttcaacatctgctggatcaagttttcttttctgtactgttgacatcaaatcatctaatgtattaaaagatgttaaatcaacaaatgttgagctagttaatgatgcattgataataggatacattgaagaatttccccataatttttccaaatttcgtagcaaatctcttgaaagtgtatgaaacagttctcttaactgattgtaatcttttggtggttgactaattgtacattgttttgaatgacgaactccagttgcagatgttgcacctaatgttaatttcacaggccgtaatgttgtattgttttcttcatcaatatcttgaatacgcaaaatcagttcaccaatgaaaacatttatccatggtagtaagtcattagtattgcaaacagatttacctctaaaatttttatttgcacccatagttttaatttgttctttttcagttataggatcgtataattcaccacgtacgattttgaaaattttgttagctaattcaatattattatctaacagtttcgccagttcgactggagttttatagtttttactaattgaagatattgacatttcacctaattgttcactgatataattaccagttttaccaccaaatgaccaaaaatctgataatttaaaatgttttaagaaattaggtattgcatcattccttataattgtttgttgatcaggttttttgaaaccactagcaagttttgcaatagttttaaccctgcctatcccacctgaagttttataacctaaaattttctctacttttttcctcaaatcaaaacatatcattgatccaattagagttactaaatcatcccaatcttctaccaaaaaattaatgttacttttctcttcactatcatcaattatagcaggctcgggttctaaatcatcagatttatttataataaaacctttataattaattgagtcgggtatactatccaatttaggtaatttatctgttctatccttcataccatctaataaagatgggaaaagttcgataattttagcaaatattaacctacctaaatccataaaactttcatcaacacttgccttttccactaaatcacaattttcacggaaaatatttaaaactttctttccctctcttcgataaggatccaatgagactttatgattaattggacttggtacgtagtctacatatttccataatggttcaccctttttgaaaacagcagtatgagctggaatcaaatggggacactttaatttagcttgttctaaacgatccattctcgtaatcccataatcacgagccgcataagaaactgcaataagagcattccattgaacacaaactactggatctgattcagccaaacccaatcttaactgttcacattgagcgaagaacgcgttaagatcaatgtgacaaatgagagataatggacttgcatatgatttatccctatcattaagatcaagtaaatccttgtaagtaaatttagagtgatccctaaatcgcacagttaccattaaattgaactataacacacaatctaattaatagttgcctttataggaaataaagaaacgccatcgaaaaaggcagaaacatgtagcgcaccattcaaagagaaaccctctctttcttaaaatttcttagcgaagtgaaaaaatttttcttagaaaatatcatcacttgcactataaattgaattgctattccttccactacttttgtaagctattcaatcgactttgctctttatctaacagatcttggcttctccttggggaggtctggagatactattattattactattactactttttctgttaatttattatattcaacgttttactgtgatgaccaactgtcgccccaaacggaactacatgaccgattcgactaagccaaacactgaaaattctgatcgtatacgttgtttatttaactatttcttttaactattgcacaaacacattcttaggagtaccagagaatgttatttgttcttatttgtaatttattggaatattatttcaaaaaataaaaaattctgtaaaacccgtttcctctaatgattaaacacttttgtatttccatgctaatcatgacaaggtatttataccgcaagattaaaacaatccggatactttctgaagagaaatgggtatagtatacttctattgcttaaagctatactcttcaaaatccacaaatttattattgctataataaaatctcgtgtaagatatagagtttcaatgttattgtttccattcatctttcggtaaagacacctcaatatctctcttttcaaattatattatcagttacatatagaactacaactaccatgggtgaagatgcaactataagcttgtttgatctctactttcccttaccttatcgagttttaatgctagtcaatttaggtttgcttatgtggcatctgaatttactggcatgtaaaatattcaaaattgatatacttatggtattgaagatatctcaacaggaacttacgctctctaaactactctatcgaagtaagaaacgtttattgaatgtttcattagtcaattcagtgaattattttatttatttatttttagttgctaatgaaataacattaacagtatctgaatggttcccattatttggtataatatttactttcatcattttactgaaaaatgatccatcatatgaatctgctagattaaatcagacaattaagagagttgtaagaggtgatattgatgtatctattagaaataatgatattttacttactgatactttcacttcttataataaagttttagttgatttttttatttacatatcagcattgatattaggtatgcaaacattaccaaatggttctgatttatcaaaggaattatccaaaaatcatttacaattttacaactttgatgtccttctagctaatttcccgtcatttttaagattaaaacaatgtttgaaagaatttaatcttagtaataaacaaaatatgcaacatttatttaatgcaatcaaatattcaactgcttttctcccaacaatttcaatcattttgtttaaatctggtatcttaaaatctcaatcattatggtattttacaacattcattaattcctcctattcattttactgggatatcacaaatgattggaatttcggatttttctctaaattcttatcctccaaatcaaacgttaaaatattgagaaataaactgttatacaataaacccgtctattatttagcaatcattattgactttcaattgagattcctttggttttataaattagtttacctaacttcgtcatcaccttcaaaacctgaaaatatcaatagttttgcaaactttattaccattttattcactactgagtttggtaattttttgttggaaatcttagaaatctttagaagatgggtctgggtatttttaaaagttgaaactgaatacatcaaattagtttcttctacagattttatagagatgcaatcttttgattaggtctctacatttttaatatacgtttaatattaattaattaattctatagaaaaataaaatgctggcaatcgtcactatacgtgctataaaaaggtttattccttcttccttctcttcatagacttactcttttccttcatattctttacctttctttcactcttacttaaatatctaaacttcttctttcttggtttacttactttagcagtttctgtctctgtaggagtatctggcattcccataagtcttgcatatttctttgctttcatcattgaactattaagaacttcatctgcttttgacatatcaacattcatcttagttgttatatctaagaaattgaccttgttattattatcaagagtttcgataacaacttcagaaacacctgatactggtgcatcatcattttcaatttcatatatttgtttctttaatattcctcctgctttcttcttttttgaatcttttttactttcatcattttcaaatcctttccattcgtcttcaaatttaacgccatcctttttctctgattcttcgtcactattttcatcattactttggtcatcattatcactatcttgctcatcgtcacttccttggaaatcttcatcttcttcttcatcctcagaatcgtcttcaaccttatctaaaaatggattcaattccatagcttccttcatttcagctaatttcttctgtacttgtaactttctttcttctctaattcttgcacgttcttcaagtctatcctttttagcttgttcttcaagatattcctgtgctttcttctttctttctaatttacgtttatggaatcccgtaagatattctttacgttgatctctatcgaaaacaacttcatttactctatgttttaatctttttgattccttatatctcttaccaccggtaagaatctctctattaggcttaggcatgtctagtagtagtttaactttaattaaaaagaaaagtttgttgacaaaatttcagaaacataaaatttcatgctgaaaaaattttattatctaaaattttgatgtgtgaagcccatcatcctttatttactgttgaattgatatattatacaatctaagcatagatactacaaagacaaacctattatagctgtaatatatagtataacaatacagttggttaaatctaaaaaaatcctccaaattccttcaactaaatatcaattactagcaaatttatttaccatcttaaagcctctaaaacccttaatcatcattcgattcccatctcatccatcacttttctaatagttgtctgtttttgatctgcaatcatttgaattagattcatacttatatccttcaattcattataggttttcaattgtcctaatatgttttcttgtttccttttcagtagttcgttatagtcaaaatctttatctagatcatgtcctaaactggacttttaaatttgcatgttcagtctgtatttctttcaatgttgtctttaatttttataatattatcagactccttatcttgttttttctgattgacatgatccttgttgaatatagcactcattgtttcgtagataaagaagccttcaatctataagttaagacacgtaattttacacaagcgaagcttttcttaattcgatattaattaaactaaaatacaaagtcctttacctaaattagaacaatgcagttatacaacgtgtacatccaatacataataatattacaacagtttttcatactggtgagccttagcctttaaagcatctaattccccttccatcatctcaatagtacccattaattcttgttgagacattttcttttttgctgcataattcagtggttctctaaaactatttcttgtatttacattagaattactaggtaaaatcttattattcgcagttttttcacgttgttcaatccattcccatagtttagattcactcattaacattctttcattagaatataattcataaccagttgactttttaccacttgaaaatttatcacagatgacaattataaataacacaactattaataaaaattttacgtccaattgatccataaacaaatccataaatgtctttggtggctcaggttcagatacctcttcaacttgctgttcctcttcttcttcttcgtcttcaacttcttcctttgacttcttacccttatccttctttttattcttagaaggtgatgcagtgagtttaccacctgatgcgatctttttcttcaattctgaaaccatcatacctaatgcttccttttgaccagagataccacctttttcaatagcacctttaatccatgatttacctgtccaaacaaatgatgtaacagcaaagagtttggtggcattatttggagcccaactcaaatagattttagttttaactttaaaagaattaccagaaggaacatctggagattcggtcagttgaacaactaagcaataaccattgaaatccatatgttcaatttcttcatcaaccaaacatctggtttgtttaggaccaacaggaccaccatttatcggtttcacatatttatatgatcttttcttacctgagaattttggtatatcactaatatcaaaattcttttgagttttcaacaaatttttaacaaatgtaacatcgtcaccaaacaataatccatacactatacctaatggtgctttgataatatcatctataatttttatatcagatgattctggggtatatccatttgatgttggtgcatgagttttaggaccttcgaatggtaatccattgaaaagttgttcatttgattcttcattttcttcattatctgcagtaacatcatcatctttaaccatattttcttgctctgagacacttgtatctgatgtgtcgacataagcgttatttgagttgtttgatttatttgtatcttttaccttttgattaattgtgacatcttcatcctctgatgatgcagttgatactgattctaaggaatctacatcatcatcaagatctaaatcgattgtatcaaggccattattattaatattggatttccaaactttgtatattaaatcatatgttggatctcttgacaggaaagatgcaaagacatatttgttatgtaaattgctaaattctattgcattcggtataccaacagttttcttcttttgaattttcaatattgcatttaatgggatagtaaaacgtgttactaaaccaataatatttgaatgaaaacaaatatgactttcacttaaatagagtttaccttgaactaaaatatcttttctatatgcacatgtaaaatcttcgattaatctctcatcagatggtaaattggaaaataatgaacggaaaacttcctgtcttttatcatttggaatcttaacatttaatttctcaaataattgatctttcttcttagcatgtgaagattcatcattattagttgtaaatctggataaactattatctaatgacagtctctttgatgttaatggtaattttagttttttcttgaaactcatactgttggacataggtatttcatttacatcatttccatcgtaaatatcatcctctgttgataaaattgatgtcaaagagttacgtaatgtttgtttacgtggtaaaggtgataatgaacttttagatctaaactttctagtaatgctttgactttttgtatttgtgttattaattgcacgatcgatctcatctaaagatggtgttgaagaggtagtagcaaaaattgttgatacattcgaaggtggttccagagttatgtttctattcattgatattttattatcatcaatatcagataataatctagtttcatttttgggaaatgagtccaatgttaaattaccttctcctaatgttgttatcaaagcttttttaacaggcttaaaattgacagcattcaaagcttcatttgatgatttttgacttgaagcagattcctctgaatgaacactttcaacatcttcagtttcatgcacgtgattagtaagatctgtaaaagatttcaaattgatactattcaacaatgtagaaaatataccagtgtgttcattgttgttattttgtttactttcggaagtaatattctcagtacctttattaattgaagagtctgaatgatttggtgttgagctttgtaatctcaaactcgatttagacaagcgagtatgacttaaagtcttacttaaaagatgtggatttttcaagaatttcttgtgatgatgatgattttcatcattgtcttcattctcatgatcgatatcaactgtatcagtttcatcattatgtcttgttaaattagtagaaaggtcatcgtcttcatcatcggaataatagttggaatattggttattttttctatcattaatatcttcttcttcttccaagtcatcgtatttgtaagatatccctgttttatctttctttttcaatgaattgtgggtacttaataatttatcaccagtcaatttcttccttacagcatctaactcctgtaatttggaacgttgttctacgaattggactaacatcaggtaaaattggtgattttgataagtctatcatactatttcctattactagatgataattgctcgggaaaagattttgattttgacattccatttgaatccctcatactcaattgtaaaccatctaatgacttttttggagtttatatttctcatagattgagatgttaatgaagttgatgataggttaggattactatccttttgacggaatttggccagcattagaagttgaacttcttttgaataatcttgtaagggtatggtttctttttcttttgtacctgtactatcatttgtacttgtattggtaccaattgatgaacttgtcagcatctgtttcttttcttttaatacggaaactcatattatttgtgaattgatttttttttctaatttaatattctgatttaatacttcaatttaatattctaattgagattctaaaaagggttaaagataattggatatgaaaaaattagtttattggcttattggcttgtttagattttaatttactgattcaatggaactttataagacttaaacacaagactaattggtaaaaaacataaaaagggatatacattaagttaagggatggtgtagtattatgcaatttgcgtgtgggaattgctaaaaattaaagcctacacgaaaactaagctgatgacaactaattttgtgagagattatatctgacttttgataaaacatgtgatgcccatcttaaataagtactgattgtagataagcaattgacatattatccttttttattgttgttgttggagggttttataaaaggaagtttttagtatacaaagagtgaagaagttatataatataaataggggatgaacattacattatttaaaatataagtatcattatcctagatattatatataaataaattgatagacaagtaatctttaataaaaaaattaacggtcttctgcccattcattctctcttctgattgcagcttcttccttctggagtgaaatcattaacgatattgaaagtttttctaatttcttcaggagattttccacggatcatttcagcaacaattttacaacctgcagttaagtagaggtttaatgttaagataatttgcagcaaggaatgatttcataaagcatttcttgatcaacattgaggaaaattcttgtcccatggatcgattggagcagattttttagaatcatcttcttgatcttccttctgggaattctacatctttatagtgttcacaccattctaagatatttttcataacagcggaacgaacattctgtgtaggcacttcaatagtatcattatcttcatcttcagaatctgatgcttcaccatcaactgggagaagattcttaagcatatttttaataagcagggatttttctgcaacttttctttcaactgtgaattttctcgttgtcagaggtaataatcacgaatggatctgttagtggacatttgtatctgtgtagttggggttgtttgtttactgaatataacaaaggaaatatgaatattaaatgaaaaggccacacacacatgctgaaacccaaagtgaaaattggctcatcagtcagtgtccccagcatgaaaatcaaaaatttgagtatttctagatagaatttgcctttcttttatagtgttattatcaattctatttgctttataaagatataaactttaaaatactattacagtgtatcatcaccatggatctttatatatctttggactgattgagcttatattgctttcactgagatattccacataataatcccattactcatgcatatagagttgggagaaatggttatattacgtaatcctcagtataaacatttctttttcttcggtgaagaaataaaattttaaattttcaatcaattttcaattgaaatttttttttttcattgcttaatgatagtacttttaagaagcttctttttggactgtaatcgattcacatatacatcacatactccaatggctgtcactaaagaatacgtgttgacaaaggtttacaactatcttactggtcaaggtttaaagaaagctgctgatgctttaactaaagatgctaaaacaaatgaaatagatttagatactgatgatgaaggtgatgttacattagatgttttccttgataatgatgatttaattgcaaaggataaatcaaagaatacttcctctaaagattccagctctgatgaatcttcctcttcatcatcatctgatgatagtgatgtagaaatgcaagatgctaaatctgaattatcagatgaaaataaaactgaaaataagaaagatgattcctcctctgattctgattctgattctgattctgattctgattctgattcttcttcctcctctgattcttcatcttctgactctgattcttcctctgattcttcatcttctgactctgattcttcctccgattccgattctgattccgaatccgataatgaagaagaacaaaagaaagaacaaaaagaagaacaaaaaattcaaaaaactgaagaatccaagtctgattcatcttctgactcctcctctgtctgattctgattctgactccgattcttcatcctcttccgattcagattctgataatgaagaagaagaaaagaaggaagaaaaggttgaaaaatctgattcatcttcatcctcttcctctgattcttctgattcctctgattcttctgattcctctgattcctctgattcctctgattctgattctgattcttcttcttcttcctctgattctgactcatcttcatcctcatcttcatcctccgattctgactccgattctgactctgattccgattctgattcatcttcatcctcatcttcatcctcatcttcatcctccgattctgactctgattctgattccgattctgattctgattcctctgactcttctgactccgactctgattctgaaaaagaaaccaataaaaagagaaaacttgaagaaactaaagaagattcatcttcaaaaaaagccaaatcaaatgaggagtcatcaaccgaaaccacacagcctaaaacgaaaaaaaataagaactacatacctgcaaaagttgatgaaattttaccaggacaaaaacatcatttttctagaattgatagatcaaaaattgcatttgaagctcgtgaattaatggataatcaatataaaggtgctgctggtacttggggtgaaattgcaaatcaaaaattaggtgctgttaaaggtaaagattttacaaaaggtaaaaacaaaatgaaaagaggttcatatagaggtggttctattacaatgagtgttggaagttataaatttgaagattaaattttgataatacccaatacaaacaaattttttcagtaacagttacttttttctcctatcgttaaagtcatattgtagaaatagttataaataaaaacattatatagtaaaaaattaattaattagataaatatattgtgttgtcaggattacattaaacgtgataaactgttctaatattttaatacagaattaaatctcttttttaaatttttttggagggtgtgtaacattttgtctaagcctgtcttttttcgtacgataattttatcatttggattctaactaagtatgtctctaaaagtttctgactttgtatttgtgcaaaaatagaacatattcagtttgttctaaaaaattaacttctatatggttacaacagagattctaagagatttttattgctattatccttgtatatagcgtaacagatggtaaatttaatattacgtaaaatcgttatcacgacggataaagttgtcgtaaaactataatatttcaagatgatagcaaatttttagttgtttaattgataacttttgtattttaagaggatatgcaagtggtaataagtaaagtagagttaaataaacatataggataaaattaattgtcaaatttcaatataaaatacacaataagaagcataaaataaaaaaaagttttgtggctgagcctcctaaaaagtaaaaaacatagataagtggaaacggctatggtaaaaagccaaacatttcttgattcatatcaagttaaagggcaaatttaatttctaaactacatgacttacagctacaaaatcattttaccatcgttttatcaactaaaatttgattcaatggaacgttttttgaagaaataaaaaaatacggggtaaactgcttaatttttaagattagcaataaaaattgtttttaactcagaaagaaatcaacaaaaatattttttttattgctttaaacagtttatacatggtggcaacaatcaaaaatcgattactatactaacctttctaaatctaagacaaaagccaaggggtttctcaaatatagtgcttaaaaaatcaagcggaaaagttagcatgacaaccaaggctaattatttgaaatttcatgtaggcaattaaatagatagtgtttaaaaataattttatattaaaaatttgttgacaattcaactaaaaaatatagtgactataattttctaaaagaatttttgaaccagaaatagcctttgaatgaaatctcatacaattaacgaaaaaagtccatatgtactattaatcaaagacgttcggaacaaattcagttttataaccctatatattaaatcaaaaccagcttaaaacgcgattcctaataattatttaacgtgatattcgatgcataaaatataaattaaataataatcccacagaataataatcatcaactgccaggggcgccaagtttagattttttgtaattatgatgagtaatcttgttctattattgaactgttacattcaatgtggtatcagacattggttttattctttcgtattttcaaaatgccaattatactattggcttttttttagttatcttgcatgttttggataaatgaaatttcaactatgcaccaccatatattgaatgaaacattattgatcacattcaataaccattataaaatatcacaccagtctatcagtttgcaaaatgaatgttacactaagctataaactctctcggtagtaaagtctacaattttgatagataattacagttttttagacagcaaacaatctcgagggacagctttccttttacctagctgaaaagattacctttaatcttatttcatagatatttttatttgttgtaatcgtttaaactgtcaatatataatatatatatatatatatattcttcggcatgaaagaaatcaagaatcttggaaaacggctatttttaataaataaaatgtaacatttaattttattatatgcaagttgtgtaaaaattcttggatgagatttaacatactcgatttgtaatgttgcaacaagatccatgcaatagaattttgtatttaatattactgaaaaattaacggttttagtttatatcactcgaatgtttcattttattctttcgttaagttattttcttttaccggatcagattgatcaaagaatgtcagtttaaaaatttttataagttatctttggctatataatttttattcgtattacaagactttgtggttttaatatccttaaagtaattaactttaaaatagtaatcttgattctactattgacatcattttttttctatttcgtcttgagataaataattattcatacaatcattgcaaatgactttgaatttcaaaatcaattataaatattatatcatctccatatcaaaaaaatgttctttttgtttaattactttaattgttataacactatttgtttttagttagagtaaaacaaagagctgaaaaatgaaacacatgcttgaattcattactgcttttcttcttttaatagcattcacaatagcagattttactgctaacattcaaacaaataatgttgcttgtaatattgatgcaattagctctaatcttggtttcaaaggtgttttttatcaatactcaacctctcaaacagaccaaatctcaaataccaatttttatgcaggtggctataaaactggtaaacccgttggaactgcttcaagtattactgatattaattttagtgttcctggtggaaatcaaaatatcaacggtgttaatattgattcttccaattttgcaattgaatatacaggttattttaaaggtacgtattgacattataattttatacaaagaataccatactaacatacttatacttcttttttattatagctgaatacgatggtttatatacattcgatttaactaaagttgatgatggtgctatgttatttattggtggaggtgcatatgattgttgtaagccaggttcaattccagctggaagcgctgatactgctgctcttttctctttcaaaggttggaatcaaccatcttcagaaacttttgcttggatctattttgaaaaaggttcttattatccaattagacttgtctatacaaatgctgtctcagctggtggtattgaattaattgttactccgccaggctccactgaatcacaaaacatcggtagtatggtttatcaattagttgacaacccatcaaatgtctgctcaaataaggtaattcaaacaacttactcatcagccactacttatattcaatctggaaatgttgctaaaactgttacagttcctcaaactcgtactattaatggtgtctctactgtgattattgaagagcaagtttttttttcaactctttaccaaactaaaaccaactatgtttcaggatcttcaatttatactagctcttattacacaggtgttgttcaaaatggtcaaacacttccagcagaagttgttgttattggtgttccattattatcaactactacagaatatgtcagtattcaaaaaactagaaccgtcacttctgtggtcaatgaaactgttggaaataaggttgttcaaagtagtattattgtcgttcaagagccaaacttacaatactcatatgtcgaagcaaacgttaactctgtcacctcaaccacttcttcatttacaactgttgttaatggtaaaagtatttatacatccgaaattattgttattggtccctctgttacaacacttactgaattctacaatggaagatatacatcaacctacatggtaactaaaacaattacagaaaatggatctacttacacatctcgtggttatgttgttgatgttccacgtggtgcttcagttacaacttgggataaaggatctagtacagtttacacaactaccctaacttatactactactggtgctgttaaaacctcagaaattattgttcgtgttgtcccatctattagttattcctacacaactggaacaggtaataagcaaatcaaccaaacttttacaaaaacagtagtttcaggtggagaaacaagtgaatatattgaagtcgtttttgtttatcccacaccatataccacaattttagaaggtccaacaagcactgactacttgacaactagtggtggtaaaacgtatgtcgttgttgaaagatcaagttttcctgttactagtacttttgctgcagtttctaaagtaacaaccacttacacacctattgtaactaacgattcaacccaatgggtttggaaagttatctatccaacccctcaaacacaagttcaagaatggacaggaaaatataccagaactgtcacaagtactttatattatcaagaaacacaagttactggttttcaatatatttattatgttccaacttattctagttctgttggttattggactggaactgctgataagacagtcaccgaaactggttattttacaaattcctttggtgttgtcagtacatcagtttatagagttgtttacaaaccttcaatgtcagaaacaactactagctggagaaggccagaaacttcaactatctttacaactactcaattcactgcaccggatggtttcccaattacgcaatctgaagcaattgtcattgttcctggtactgatgttgtcaattcatggacaacttctagtatttacggaccttgtactacatcatctactgatacatcttactctgtcaccacaattaacaataaagcaacaacaattggtgttgcaatagttagtggtcctgacccatcttgttttgctccaccaccaactacaatttctacaactttaatgtcagttgcaactgattgttctacacactcttccacagcaattttttcaacaagaggtccagattatgcaataactgaatctatcatcgttgttattgaaactcctgttccaaattgccaacctccagttaccgctaccacaacaacacacgttccagcaactgactgtggattaacaacatcaacaacatcaacagtcactacagatactcttaatcacatcacaacaatagttagtgtcattatcagcactccaccagcgtcttgtacaatcaccaccatcgtctcaacatctgttcctgccaccgactgcgctttgaaaacatcaactacatccactgttaacacaaatagtaataaaaaggtaacaactactgtcagcatcattgttagtaccccagaagcatcatgtacagttactaaaactgtttcaaccactgttcctgcaactgactgtggttggacaacatcaactacatctattattgctacaaattcaaataataaagttacaacaaccgtcagcatcattgtcagcactccaccagctttatgtacggttactaaaacggtctccacaaccgttccggcaactgattgtgcaccgaaaacattaaccacatcaatcgttaacacaaatagtgacagaaaagttaccactactgtcagtattattgtcagcaccccaccagcctcatgtacaatcaccactaccgttttaactactgttccagctactgattgtgctttaaaaacatcaacaacttcttatgttgcaactaattctgataaaaaagtcacaactactgttagccttattgttagtactccaccagcttcttgtaccacaaacactacccggttaagatctgtggatgcatcaaattgtcttttaaaaactgtcacatcaacttcaatcattactggtatcgataacaaagtcactaattctgttgacataattgtcaataaaccagtcaaggcatgtacaactaccaaagttttgacttccactgtttcagctactgattgtattcatcttacatccacttcaactaacatcattaccgcttctgataacaaagttactacttctttaactctaatcgtcagtatcccagcttcttcatgtacaactaccaaaatcattacagccactgtacctgctacaaattgtgcattatcatctacatcagatacatcaatcgctactggacttgacgaagaagttaccactattatcagcgttacattaagcacaccagtctcatcttgtacaaccaccaaaaatgttacaacaaccgttcctgccacagattgctccttgaaaacatcatcaacatcttacgttgtcacacaatcaaataataaagttaccactattgtcagcgtcattgtcagtacaccaaaaactacctgtaccactactaaaactgtcactacaactgttccagcaaccgattgcgctctaacaacatctatcacctctattgtcgctaccaattcagataaaaaggtcaccactactattagtataattgtcagcacaccagcagcttcatgttctgttactacaactgttactaaaactgttccagctactaactgtgaattaaaaacatattcatccaccgtcgctgttaccaattccaacaaacaagttactactgtgataagcattattgtcagtactccagcaccatcatgtacattcatcagaactcttactacaactgttccagccacagactgtattctatcaacagagactacaacatcagtagttactaattctcaacatcaggtagttagtattgttagtattattgtaagcactccaaccgcttcatgcacacaatatcaaacttttaccacatcggtcccagctacagactgtttattaagttcaacaacctccacaattgctgttacaggctctaataacaaagtcacaactattgtaagtgttataataagtactattgttccaacctgtacaatatcttcatcatcaccaatacgtgttccaacaactaccatcgccacaatatcttcatcatcaccaatacgtgttccaacaactaccatcactacaacaacttcaaccagctatttaccaggaaatgattgtgaatttagcacagctacatataccagcccattatctacaccagttgatatttcagatgatagtgtaacacagaccatcattgaaactgtctatactcctgcagcttcatgtgatatttttattacaactgagctagcttttaattgtaagtcagcaacatatactaccaatatcggcactgttaatagtgaaggaagatacattaatgcaactttgattgttgttgagagtccagcccaaacatgtttccagtcaacctcaattgagccatcaatctcagttgcaacaccaacaaatttatcttctttggattccatttttacaccagcatcaaccaccgctccagcaaaaataacatctaacgaaaaaacaaccaatactgaaattgtcacatgtacagaatcatcatgtactgcaacacaaggaaatccaaaaactacaaaaactgttacagtccaatcaacaacgttaattgttacctgtaccaaacctgaatgtcaaggtcaattgtcaaccaccgttgttcctttagcaagcaataccaaccctacatcaaaaaactctcaaactccaccagaaaattctcaaccaacatatacatcaactgagaatcctaatacaccatcagttgaaacatcaaatactttaccaaactataataatgatattacaccaacaccaaccaattcagttatcacagatacttctaatacaactagctcaaacactccaaattctccaaacaatttaatcattccaactgggtcaactgcaccaactgcaccaactgcaccgactgggtcaactgggtcaactgggtcaactgggtcaactgggtcaactgggtcaactgggtcaactgggtcaactgggtcaactgggtcaactgcaccaactgcaccaactgcaccaactgcaatcactaccaacgataggaatgaaccacaaccaactactcttgctgaagaaccatcaatatctgtaccaaactataactatggtagtactgttgttccatcagagccaacattatctgtttccatttatgccggtgaaggttcaaaatttggtatgagctctccaatgacatttttctgtctctttatgtcatatctgttcttatgatgaactaaaatttctttttgataccttttaatttttctctccattttccttagctgaatcctatgattttaaaatcaatatttgatttcgaatattgataaagttgaacaatcattaaattctctattgttcacatactagttttttttcatgtttttcataatactatagacaattttgatttcattttgtgtcttctattttatattttagtgttttaatttgttatctcctaaaaactttcttttatagacccaattatataaaaattataaaagtgtattctcttctatatacagtttgactttatatacgctttataattacgtaaatgtaacatgttttgattacataatcacgatcataaaaaatcttacataattcttaggccaaagctgattaattcaatttgaaaggaataccaactaccttctttcaactttctttgatcatcccacttagtagcccatttaatctaacaatgtctacagctgctgatagtacctctgctcaagttaagccattagagaatttgttttctgatgatagtttcacagatgataccgacacagacaacgaaccaacaattataccaactaaaaggagatcagctaaattaacagaaaaggcaaaggaatctatcaaaacaattgaagaggaagcaagtaataaagagtttcaagaagacgaattacttaagatcaaacttgatagaccaagtgattttataccagattcagtttcacatatttttgcaaacagtgatttttcttatttaaagctaaaacctgatcattcatctagaccaatatggattagtccaatggatggtaaaatttttttggaaagtttttcacctttatcagaacaagcccaagatttcttagttacaattgcagagcctgttagtagaccaagtttcatacatgaatataaaattactacccattcattatatgcagcagtctcggttggtttggaaactgatgatattatatctgttttgaatcgattatcaaaagttccaatagctacatctgtaacggatttcatcaaaacagcaactcattcatatggtaaagttaaattagttttgaaatataatagatattttgtggaatcatcatctgctgaaattttaagaatgttattaaaggatgaggttattggtaaattaagacttgtatcatctgaagaaaaatcagtaacagaggatggtcttgtgaaaactgaggcaccaactcaaggtgatctagttattccaggtacgaaaaagaatcatttaaatgataataataaaggcgaaggcgataaagataatgaaaatattgaaaaacttgatgaagaagtcgagaatatttatgctgatgttattgcagatgcagaggatgaaaatactgatgataccgttcattcatttgaaattgcgtcagaaaatgttgaaaccattaagaaaagatgtcaagaaattgattatccaatgttggaagaatatgattttagaaatgataaacgaaatccggatttagaaattgatttgaaaccatcaacacaaattcgtccatatcaagaaaaatctttaagtaaaatgtttggtaatggacgtgctagatccggtattattgttttaccatgtggtgctggtaaaacattagttggtattactgcagcatgtactatcagaaaatctgtcattgttttgtgtacatcatctgtctcagttatgcaatggagacaacaatttttacaatggtgtacaattcaacctgaaaatgttgcagttttcacatctgaaaataaacaaatgtttagaggtgattctggtttagttgtgtctacatattctatggttgctaatacaagaaatagatcacatgattcacaaaaagttatggattttttaacatcaagagaatggggttttattattttagatgaagtccatgttgttccagctgctatgtttagaagagttgttacagcattagcaacacatgcaaaattaggattaactgcaactttagtcagagaagatgaaaaaatttccgatcttaatttccttattggtccaaagatgtatgaagcaaattggatggaattatcacaaaagggtcacattgctaaagttcaatgtgctgaagtttggtgtccaatgacaagtgaattttatcaagaatatttaagagaaagtgcacgtaagagaatgttattatatatcatgaatccaactaagtttcaagcatgtcaatttttaattcaatatcatgaaagtagaggtgataaaattattgtcttttcagataatgtttatgcattaagggaatacgcattaaaattaggtaaacctttcatttatggttcaacaccacaacaagagagaatgaatattttacaaaattttcaatataatgataaagttagtacaatttttctttcaaaagttggtgatacatcaattgatttacccgaggcgacatgtttaattcaaatttcatcacattatggttccagaagacaagaagcacaaagattaggtagaattttacgtgcaaaacgtagaaatgatgaaggttttaatgcatttttttattcattagtttctaaagatacacaagaaatgtattattcaacaaagagacaagcattccttgttgatcaaggttatgcatttaaaattattacacatttacatggaatggaagatttaccaaatttagcatatgcatcagcaaaggaacgtagagaattattacaagaagttttattaaagaatgaagaagctgcaggtgttgaattaggtgaagatgcagataattttattggacatggtatttcaaagagacttaaatcaagttcaacaaagaatcaagcatcaatggccggattggcaggtggtgaagatatggcatatgttgaatattcaagaggtaaaaagaataaagaagttgaaatttcacatcatccattctttgagaaaaactattacagaagaagaaagagataatggaggacgatatattaattacagacaatggttttttttttgagattttttttctttttgttttctttttttgataaaaatataagaatgataatacttctataatatctatagtatacaattaattaatttacataaaataaaactaaattacaacaaatgagttttgaaaaaattattaggtatcagcagattctatttgctgtttaagttctttattgacttcagttaaagtattttcaaattctgagataatatcacttttaaaatctacaactgattccaatgaagttgcaatatcgaaaattaaattacttctcttttcactaattaatgacattatacgtttgtattcttcctgtgtatctttccatttttgatcaactaattttttattatcaatattttgtgatttaaatagacgtatttctttaaccatttcctcaaattctatttgctttgcagatgagtctgcagtatatgaatcatttaaatcattatattctttacgagatttagttaatttatcttcaagttcttcaactttatccttatctgacacaattgaaagttttaaatcatctaataattcttgtgattgtaaaatttcatcttgaaatttatttatatcagataaaatatttaattttaattcattaatagatttttgaacatttaataaatttggtaaaatatcaattggttttgtattgaattttgatgatttaaattcatcattaattgaattaattattaaatttgaagttgatattggatttgaaagattaagattatttaaaatttcataaattaaattatttgaggttgttacaagtatttgtaattcattgaaagaattttgtaaatcaattaattttaaatcaattgaatttttcaaatgagattgttttgaatctaattcatttaaactattagttaatattgctctctctttatgtaattgttcaatatcatttaaagttaaatttttcaattgtaaatcatttattatatcttgcttttctttatttatatttttaattgattctttgatatttataatatcagaatttgcttttttaattatacttggccatttcaattgtctttgcttttgaatttctatataatttttaaatttaataacatcattttttaaagcatttgttctatctaattcatcaaaaaatatattatatttatcattagctatatttaaagattcttgtaaattttcatttaattgagaattataatcaaatttatgttgaatttgatcaatataatttttatattcataattcatttcatcataaaatttagaataatcatcatcacctagtaagaggaatgatttataagattttaaagcatattcaatgaaaagtttgtttagtactgattgttctgcttctattaccgaatcatcatatttgttattattattattattattactattactaccaatattatttatatcagctaggttattaaaatctattgagtcaaatttaattgtatttttaactaaatctaataaccaatataacattgctaagaagattggccaatttgaaccaccaactgcacttatttgagatttattaatagtatcaataaatggataatttaaaaattttaataaagtataaatatcattatcaattgatctactaaatttataacctggatcaattttatgatataaccattggaaaattaacaggaattccttttgagttggagttttcaaagttttcaaagataattgttgtttcatttcaatatcaaatttattagttgctaaaaatttatataattcatcttgtaccattgattgaaatctatgactacgaattggtcttggatcttgatttttcaattgttgttgatgttgttgatttctgaaaattccaccagctgatgttggtaatggttgaattgatgattctctttgattattattattatgtttgccatttataccattattattagttctttgaattgaaccttgtactaattgttgaattgttggagttgttgaactattattattgatattattgatattattattacttaataatgattgacgatgttctaaacggtgtacaggggtcattgaggggcgattaatcaatggacgaggaccaagtggagcaccaagattagccccgggaggagcatttgaaggtaaaagactgagtcgctgacgtttacgcataggacccattgaaggagttgaagttgccattgcaataccaatcaatttcaaaagaaagaagagagtataatatagaaatagaaacaagaaacatgtaaaaggacgttatgtaaacaaaatgagaaatttaatttttcactatcttaatgatgatgatctatcttatcttgaaagacaacggtaatgagtgggtctctacgagggattggcactgggagtagacatttggttggtcagttgagagatcagtatcgtaatgttgtattaggggagaaatctttacgtagtaatagtagtaataatgataataataatgataataataatacccttgataaaatcactatagactaccctccagtactggataagataatcacacgatttaatgtaatggaaatggaatttgctttcggttatggttcaaaagtattctctcagggtaataatgataaatctgaacaatcacaaattgatatgatttatgcagtacgaaattcaattgattggcataatgaaaatttaattaaaaatagtaatgattattccattttgaaatatggtggtggtaaaattataaatactgttaatgattggggggctggtgtttattttaatccgtttgttcaagtatcagttgataataataataataataataataataataataataataatattgaattaaaatatggtattacatctaccaaaaatttaattgatgatttaatcaattggaaatcaatgtatttagctggtagattacataaacctgttgcaattattaaacaatcaaatgaatttaaaattttcaatgaatataatttaactaatgcagttaaattatcattattattaataaataaagaaaatataacatttaatgaattatttctgaaaataactgaattatcatatattggagatccaagattaaaagtacgtggagagaatcctaataaagttaaaaatattgttaataatcaatatgaaattttcaaaatattatatatcccgatattagaaaataatttaaatgatttaattcaaattaataaaaatgatgaaataattaaatttaatttaacaattgaatcaattggtaaaatattggttgatttaccacgtaattttaaatcaaaattattatacaataatattaataaatatgaatatgatgaatttactaatgatgttaaaataaatccttttttacaaattggtaatgaaatgagttataatgatttattaaatattaaatccataaatgaaatttcatcaaatgaatgggaatatttaccaaatgatattaaattatcaaattcttcatcaattagaggattatctgaagaatttttcaataatggaaaaattatgcaaaattcattaattaatgtcattgaaacaatagttggatcaactgcacttgtacaaagtttaaaaggtattttaactgcaggtattgtacgtagttataaatatgcaatagctaaaagaaataaagctaaataaaataataacctatctatactatatactattatactattatacatcaattttaattgtaatactttcaccaattgtataactaactgcaagtaatttattaaatttacaatatttcaaatctgaaataattgaaccttttggtaattgattttgaaataatgcaatttgtttaatattattaattgaaattttccaaactgaaattgaacctgatgaatcaccaataaataataaattatcatcattattaaaatttgcaattaaaataccatttggatcatcaatatattttatatcaattaattcattttcaaaaatattccataatctaattgaaccgtctaatgaagttgataaaattaaatgattttcattagaatcaaaccatgtgagataagttatcggtaatgaatgaccttttaataattgtaaacaattagttgaattacctttaaaaattctaatatttgtatcatctgatgaagttgctaataatttacaatttgaattatatttaataaatgaaattgaatcttcatgacctaataatttcccaataattggattttcattatttaataattgattaacaattaatgaataatttggaccaggtataataaatttataattatctaaccaacaaacatctgtaccaaaaagtgttatatgattagtgttattatcattattattttcttttattatatctttaaatgaatctttatctaaacgtactattggtaatttagaagatacatcccaaacaattattatattcattaaatcaagtgaaagtatatattttgaatttggtgaccatttaacttgaattattggataatgatgaattgctaaaattgcatataaactattatcattaatattattccataattgtatagtaccattttcacatgcagttaagatataatgttcatttggagaataatttattattaaaggttgtttatatgaaggtgatattggtaattgaatatttgaatttgaattaaataaatgaattaatgaattatttgaagttgttgcaattattaaagaatttgaagattcactcttttgggaaaaggaaagtgaattagaaggtgggaatgacatttcctttttaagtattttaataaaatgttgtgaagatggtgatgttggaggtattgaaggagatgtagatatagatatagttgtagttgtatcctttttaacatcattagaagatggatttttcaaattagaattagaatcatcaatagcattaaataaattaaaattagaacttataagttgatcctgtaatagagtatcattatcaataattgatgataattcattcattttagaatataatatacctttttgaactaaatctaccaagcaacctattggaactaattttgaatatttattatccaaggtatgaacattagtttcatcatccaaagcgtaagatgagatctccaatcctttctcttgaagatgtctccagattatatagttaagttcatcagatgatagtgacattgtttgtccaataaagaactgatgtgtattaaagtattgtaattaagaaaatttcagagtctattacataataataataatatagtccaataaaccgtttttgactccgtttaccgttcttttagtaaggacaatgaagttaggtacgttatctatggttacattctccaagacacgaatacctgaaagggtatataaagaaaatgaacaagatcaagacattatgtatattaaatataataaaggatggggtgaatatttatttagtggtatagttgaattaattgaagataatgaaggttatttgaatttagatattaaattatatacgggggaggaagtttgtaaagttaaatattgtaaagtaaatgataataggggtaaatggtttaaggatgaaattaataatgaatatgttatgacaatacgtaaagttgatataatggatgaaagatattgtatattagttaaatattttaataaaagttatttagagattggtatgggattatgtcctggtgatgaaactaaatttgatattttattaaataattataaatgatagtgttagtgttagtgtttattattatatacaggtttatataatgattataatatggtggtatgaagatataatgatatgaagatatgaagatataagcatataatcatatgaagatatgatggtatgaatatttaagtatataatcatataagtatataatcatataatcatatagttaaattatcatataaagatattatcatatagtcatataatcatatagtcatataatcatatagtcatatcatcgtatgagtatatcatcgtagaagtatatcatcgtagaagtatatcatcatataatcatataatcatactaaagtatgattatattcttatactctaatatactttaattaatatctctcccattcaatattacgcaattgtcttgcaattttagcattctttctcttaattgaccaatttgaagcagttttagataatctctttttagctaattcaatagttttattgttagcctttgttgtaatattaataaaatgatcagaaacattaaaagttgccttaatttcccttcttggtataccattatctctcatattttgaattttttcaattattttattatcatgtaaataattttttggatttgaagattgataaatttttggcatattattggaattattttctaaaaatgataaattttgtaaataaagagatgaatttttacgtttatcatttgaaggtaggaaaatttttggagttaaaagtggagttgttgtagctggagctggatgaaagaataaaccttgaggtaaatcaggacgtaaattaaatgcagaggatttattattgaaagaattaggggtagtacctaatttctttatagtattagcagcagccttgactgatttagtagtacctgacattgtttaaaggaagtgtatcaaaagagactctatactatactatactatactatactatactatactaataaattggaaattcatgttgtgagaaaatgaagatttttccatttactatggagtacttccttaaactttgtttctacaattctttctctctctcttttggcaatgtttaaggcatcacagagggcttatatatcccgttctatattcagtaccacttttctggtggccactgctatggtaactgctaataccctatttccatgtccaatagatcacacattggcaaatgattctccacttaatgacgttaataatgatgataaaaaagttataaaagagtaatcactatactattcaattacattacattacattctattctactatgatactatactatactacactaattactattctacactgtatataatataatataatataccatactattactatataataaaacacttatttatactattatactattataaaaaaaatttacacctttcgctattggttgaattaattattattaaaattatattcttcttcttctatttgccactcttttcttttctttctttctatctttctttcatttccttcttttatcacacaactatgtcatccgtagactctgataatgattcagactattctcctgaactcttattctcatcatctactaaaaaattagatttagattcaaatctagatcctattaatactaataataacagtaacaatcctattactaacaatactacaaataatttacctgcttcattacctcctattccactaggtaaaaaggtaaaatttgctgaaaatcactactgaaataccttctactgataataatgatgataatgataatattaataatgataatacattaataatgaaaattcttcattcatcttcaaattcttcttcaacacattcatctcctaaatcatctcctaaatcatctcctaaatcatctcctaaatcacctcctcaatcacctcctcaatcacctcctcaatcaccttcacaattaccttccccctccctttcatctcattcaattattgaaactcctcaatcaattgaattatttaataaattagttcaatttattattaataataattatatctctgatccttcatttattaataaatctccaattgagaaaactttatttacaattaattcttataatttagcaaataattcaaatatttcaattaatgatgtaaatttaaattttaatgcaacaacttcttataataaacaaattttaaaatcaaatgatgaaattcaacctttaattccaattaatccattttgtagaagaattgatattaatattcaattaaatgattcagatttattaaatttccaaaaatttaaaaaaaataatgaaatttattcaaaagaatttgaatgtattaatttcccttcaggttcacgtttatttattggtaatttagctgttaattcattaaaaattattgatgtttggaaagttttcatgccttatggtgaaattatggcaattaatttaaaacaaggttatggatttgttcaatttaataattcaaaatcttgtttagatgcaattaaaggtgaaaatcatgttcctttacataataaatttatgcaattacaaatttctaaaactcatgaaaaacatactgaaaataaagatttaaaggataaaattattaaagatttaagtaataatcataatagagatagagatagagatagggatagagatagatcaccaacaagaggtaataatattaatactaacaataaagttaaagttattatctcaattgattcagatccatcatttaatcatttattagttaatacattaaatgaaattggattagattgtaatgttaaacatattgaagaatctgctgataatataccacaagaaattatttcaaaatctgcttattcaggtgtaattgcaacaattgtaagttcaaattcagaattagttaatttatatttatttcaaagaaataatattgataatgcaattaaatttgatcaatatgatgaaatttcacttgaaagtgcagttaattttattaaagagagaagaaatttatcaaataattctaataataatacaagagaacaaagggatagaagaaatcatagagatagagatagagatagagatcgtgataatcatagagaaagagatacaagaagaaatagaagaagaaataataataataatagtaataatagtaataacaattctaattctaacagagttcaatatggttattcacataatcaacaagatgttcaaaaacatttaccaccaattgttccaacatcatattcaccatatcaatctgtaccacaatcattaccacaaccatatcaacaacaacagtacccaccaccaccacaagtacaagttcaacaaccaataccaccatatcaacaacagtatccaccgcaagttcaaccaccagtacaacaaccaccttaccaaccttattcaaatcaaccttatcaaccttatggaaattcaccttatcaaccaccacaaccacaaccaccagcaaatcaaccagttgcatcccaattagtaaatcaattatctcaacttgatgaaaattctcttaaggcaatgatttcattagttaataataataataataacaataataataattcatctgcccctcctcaagcacaaccgccagttcaagcaccttcttcatcgtcagcggatgatgatacaagtaaattatacgagacactggcgagattaaagaataacatgtaataataataataataataataataataataataataataataataataaataggtttacactttactatactttactttacgtaataaaacactaatactaatgtaataacagataataataacagataataaaatacataataacaaactctacggagtataaccatacgtaaaataaaatgatcaaataatgcaacactggaaaatcatttgattatgaaatttcaattttccaacgcaacgccgttttaatataaagtcaccgtgttttcaccactgatttccgtgtttccatttcaattgctctgctttgctttgcttttcttttcttttcttttcttttcttttggttttatcttttattcttctcttctatcttatttcttaataacaaataatgtctttagaggaagcatttgaagaaactaagaaagaattaactattacaactaatcaacttaatgaaattactaatcattttgttgatgaattaaataaaggtgcatcagttaatggtggtaatataccaatgattccaagttgggttttaaattatccaactggtaatgaaactggtgaatatttagcaattgatttaggtggtacaaatttaagagttgttcttgtcactcttttgggtgaaggtaaatttaaattttcatcagaaaaatatcctatacctgaaccaatgagaacaggtaattcacctgatgaattatttgattttattgctttaaatttacataattttgttatctcacaatttggtgaaatcaataaaattgaaaaacctttaccattaggttttacattctcttatcctgctttacaaactgctattaatacaggtgttttgaaaacttggacaaaaggttttgatattgatggtgttgaaggtaatgatgttgttccaattttacaaaactcaattaataaattgaaaactccaattaatgttgttgcattaattaatgatacaactggtactttagttgcatctaaatatagtgataataaaactataatgggattaattttcggtacaggtgttaatggtgcttattatgatatggcaaatgaaattccaaaattacatggtaaattaccagatgatatagttgaaaataatgaaccaatggcaattaattgtgaatatggtgcatttgataatgaatggaaagttttgccaagaactaaatatgacattcaaattgataatgaatctccaagacctggtgaacaattttatgaaaaaatgattgcaggttattatcttggtgaagttttaagattaattttattagattattattctaaaaatttaatttttaaagatcaagattttaaacctttacaagttccatttgcaatggatacttcatatccttcaagaattgaagaagcaaaggataaatcatttattgatgaattatttttagaatcttttaatattaaaattacatcaattgaaagaaatttaattcatgatttatgtattttaattggtacaagagctgcaagattatcagtttgtggtattgcagcaatttgtaaaaagagaaattatacttcaggtcattgtgcaagtgatggatcagttttcaatagatatccaaattttaaatcaagagctcataatgcattaaatgatattttccaatggaattgtgatccaaaggattatccaattcaattaattcatgcagaggatggttcaggtgttggtgctgcaattattgcttgtttaacagaaaaaagactggaacaaggtaaaagtgttggtattaaatcaaaaatttaaatcaaaaatttgaaattaaattcaaatttacttctataaaataattgatgatgtccttttcatgtccttttcatgtcccttactttacttcacttctttctactatccctttttgtatagcttatatattagaaattaaattaaaatattgaaatgttataagttagtactataatatcattaaacatcgcgttttgtacatgtcaatatttatcatcaatctttaacttataaaaaaacctctgtttccccttttcttacctgttgtttttgcccttgaacatgcatcaataatggatacactacgtaaactaaccatttatgcattgaataatgatatgtatgatacagctgaatttacagcggagagaatcttagctcaatatgataatgaattaaatatttcaaataaaaagcaaaataataataagaatagtagtgataaatcaagaaatagtaataacaattcaattcataatgcaattattacaggtactccaacacctaataaaaattcaattaaaaatattttaaataatgaagatattgaaatagaaattgaaatcgatcaaacttcaacaaatttatcatcttcaaatgaattaaataaacttgatgcaattcatctttatagttatgttttatacaagagggggaaatttaaaactgcatttaatataacttgtgataatgctcaattacatataggatgtgcatatatttttgctcaatgttcattaaaattaggtaaagaaattgatggtattagaatattattaagaacaatgaatatttgggaatcaaataattataattataattatactaatttaagtgatattatacccgattcaattgcattttatcttttactagggaaattatattcatcaattggtgatattccaagagcaaccattcattattcaaatgtacttaaattaaatccttatatttttgaagctttagaacaactatgtaaattaggtgttaaagttaatgttgatgcaatttataaaaataatggtgaacttttaattaacgctgaaaatgatattaatgacgatataattataaatgataataataataataataatgataatgatgataatgatgttgataatgatgaattagatataactaataatccactatttaaaactccaattactaaaccaacaataacaactagctcacctgaatcaaattttatgactccgataaataaatcatcattgttgagtaagaaaacttttccaaagaaaacttttaaaacatctaaaaacttgcataataataacaatatcaataccaatgccagtacaaataatagcaacagtataaatataaattcatttctttcaaatggtaccaaaagaaatacttcaattacttcaagattaataaataatggtagtaatcttttaaataaagatataaaaaatgttttcaaaaaggatagtggagattcaattgataattcaatcataaataataccactgatgaaatatttaaaattcataatatggaaaagagcaatttattcaatcataacaacaataataacaataatactgctgctaatgtaaatacaaataataaaccatcatcaactaatagagcagtcaaaaatgaatatataaggaatatttattgtaaaattggtaaaggtatatcagcattcaactcttttgattgtttccaagcaattagaatatttgattcattacctgaaaatgaaagaaacacgccatacattttatcaaagttgggtaaattacattttgaaattgttaattatgaagagagtgaaaattattttgaaaaactacgtaaaattgatagaactagattagaggatatggaaatttattcaacattattatggcatttacataaagaaattgaattaagttttcctttcacatgaattatttgaaattgatgataaacatccaaatacttggataagtattggtaatttatttagttttaagaaagaaccagaggatgcaattaaatgttttaataaagcaattgaatttgatgataaatgtttatatgcatatacattaaagggacacgaatatttggcaactgattcatttgagaattcaataaatagttttagaaatgcaattgttttagataaacatcattataatgcattttatggtattggaatggtttatttaaaattaggtgatttccataaggcagaatatcattttaggaaagcagttgaaattaatcctgtcaatgtaattttaatttgttgtgttggtatggtattagagaaattaggtaaaagagaggaaagtttaaaacaatatgaatttgcagttaaacttcaaccattatcaatgttagcattattcaagaaagcacaaatattatataatttgaaaaggtatgaagaaggcattgaaagattttgagaaattagagaatttagctcctgatgaagcaagtgttcatttcttattaggtaaattatacaaattttatggtaggaaacatgaagctgttaaacaatttactattgcattaaatttagatccaaagggtagtcatttaattaaggaagcaatggaaagtttaaatgatggtataatagattaataataatcatattcatattcatattaattatttttataacagatatttatacctataaacaagtggaaaagagagggaggagagagagagagagagagagagatatgcacatataaacataattaataaccttttctaacagcatctttaacgacactaaataatttagcaataccattttcgaaaactcttttacgattagcaactttcttagccaaacgtttcttatttggttttataaagaatcgttgactaaaattaatttctctaagtttattagttttaactaagatatcgagacgtgaaattgctctatcaatttcacctcttgcaacaataactgaacgaccagctaatttatcttgaatgatatgttttgttgcaaattcataaggattatgaataattgatgattcacttgcactaaagctaagtcctgatgatttattctcttttatacttttaatcatttgatcaactgaattaatatccttttcagcatttaattttgaatttgtactgttatttcttaaaacagatggtctccataatgatttagagacatttctagtagtaaatgcggcagtcttaaagaggaacatcgttgtctatctactgtaaaacagtgaagtgaaatgaaataagtgaaagaaagatagattaatggaaaatgttgatgaaaaaaatggaatttttgaaagagtcgcttatataaggacactttccaattttcaatgctttttatacatggatggttatatactggtagctctttgatttactttatttacttgatttatcaactatgtctgaaggtaacactgctgtggaggaaattgtagaaaaggtggaatctttatctactgagaatgagcctgctaatgatgtaattgatgcaaatgatgcaaatgcatcaagttctagtgataaaaagaaaaagaagaagaagaagaataagaataagaaacctgcacaagttttcgaaaattcaattggtaatatctatagaggtgtttatccagagggtgaatttcaagattataatcttaaacgtacaacagatgaagaaattagagctgattttaatttagaggaagctgaaaaaacttggaataaatttagaaaaggtgcagaaattcatagaagagctagaaaatatgcaagggagaatatgaaacctggtatgacaatgattgaaattgttgaaatgattgaaaatcaagttagagaaatgtcaggtacaaatgattcattaaagggtggtatgggattcccaactggtgtttcattaaatcattgtgcagctcattatacaccaaatactggtgataaaactgttttaaattatgatgatgtaatgaaagttgattttggtgttcatgttgatggttatataattgattgtgcatttactcatacatttaatgataaatatgatccattattaaaagctgttaaagaagcaactaatacaggtattaaaactgctggtattgatgttagattaactgatattggtgaagcagttgaagaagttatggaatctcatgaaattgaattagatggtaaaatttatccaattaaatgtattagaaatttaaatggtcatacaattttaaatcgtaaaattcatggtggtaaaagtattccaattgttaaaaatggtagatccaactaaattagaagagaatgaaacaattgcaattgaaacttttggttcaactggtaaaggttatgttaatcatggtggtgaatgctctcattatatgaaaagttgggaacctccaactaatgcaaatattagattagatagagcaagaaaattaatggatacaattgataaaaacttttggtactttaccattttgtagacgttatttagatagaattggtgaagaaaaatatttacttgcattaaactctttagttaaggaaggtttattaactgaacatcctccattagttgatattaaaggttgttatactgctcaatatgaacatacagttttattacaaccaacaagaaaggaagttgtttcaagaggtgatgattattaattaatgattaattgtattatagttaatattgggaaatatatatccatcagaatttttatagaaataatcgaactaacaaagaaacaaataaacaaaatatattattaatcaaaaatcatttataaaaataatcatatacattatatactgaattatagttcgtctttatctaacaatacctctgttatgatatcagtagctgttgcaagtgttgtagatacagtttgagaaatcaaacttgaatactacattagttgaattaatctctacattaccactttgaactgatatctaaataatcattttcaatggagataaaattaaccataatactaataacacaggtctcttaaggattcgtcgccataaaatccaacaacaaactgatataaagaaatataatgaacgataaatcattgctctttcacatttacttgctttattaattgatttaacaagtccattagttttatttaatacatcaccaaaaaatgcataactttcacctaaattagaaattgaatttgtagaaatatctaattctgaaatattaatttcaccagctaataaagttgattttattaatgcattaacattttgaagtttatcagttaatttagtattttgtcttaataatctctcttgattactcaattcctctaatttttcatcattcaaaccttcattgtttaattgatcattgttatcatattcatttaacatttcattatcatcatcatctgtattactattcttaattgataattcacctctagtgaaagattttaaatacaatgtttcattatatttcctcttttcatcaacttttttcattctataccttacatatagatctttcaataattccttactgtgaaacaaattatattctaatgaatttctgttatcatttgttgaaataggtattatctcatattgtaattgagatatatcaatttcaattttactcaataactccaatattttcgtattagaatcatctattccctctgcactttccacatcttccacactatatttctcaatgcaaatacctgcactatgtatatctcgttgtatagtgtctattagatccactgacatctataatcttcccccaactatcccatcaaaaagatcaaaagagatcaaaagagaggtgtaaacctctaaggaagatggtagtaggaagagcgacattgaaaagtgaaattttgtaaagacttatattattatggtttcttttgcaaattgtcggtggcaaatactttgtttggtcttcctttgaagtagtttgtaggtattgaacaatgactgaagttatcactgctgctatacctgattttaaagtatctgaaactgtctttcttgcacaacatgaagataataataaacaattgattgaatctattgtttcatcaatagtaaaggaaaatatgtcatcatattatcattatttgtattatgatattcatttaaagggacttgaatgggatcaaagtatttatgattcacttttaagtgaaagtgaaaaaaatattaagaaaattaaggaagaaattgaaaaacttgaaaaagaggatgaatcagagatggatttattaaagaaatggacagaattaggtgaatattatgccaaaattggtgataaaataaatgcagaggaaacattattgaaaactattgaattagcaccgagtacggggtctaaaattgatttatatttattaatttcaagaattggatttttctataatgatttagaatttactaaaaaatatttagataaatcaaatgaatttattgaaaagggaggtgattgggagagaaagaatagatataagacatataatggaatttatttaatgtcaattagaaattttgaagaagcatgtaaattattaaatgaatcattaacaacatttacatcaactgaattaacaacatatgaaaaaattgcacaatattcattaatttgtggatcaattatatttgagagaccagatttaaaaaataaattaattgaaagtcctgaaattttatcaattaattcaacaaatgaagaattaaaaccaatttttgaattagttaaaagtatttatttaactgaatataataaatttttccctgcattattggaaactaatgatttaattttgaaaaaggataaatatttatttgaacattgtaattattatatgagagaaattcgttgtcgtgcatattctcaattacttgaaagttatcgttcattatcattaaattcaatgtcaaaatcatttggtgtaagtgttgaatttttagataatgatttaagtaaatttattgttaataagaaattaaattgtgttattgataaagttcaaggtattgttgaaactaataaaaatgataataagaatttacaatataatacattaattaaagcaggtgatgcattattaacaaaattacaaaaatatggtgcagctgttcgtatgagtggagctgaaaaggtatagattatatgtattatatattatattattataaataaatattatataaatattgtagaaacttatacttaaacttagagtaatggagcagaattaagtatctcttcaattctctcatcttcaacaagtgaactatcagaatatttaccatcatattccatttcattagattctgcaggtatcacttgacctttatgtttatcatctaatttaacattaagtatttccttctttgcatcatctgtcttaacaataactttatcaccttgagtcagatcatccatcatctctaatttatcagattcattatcagttgtagtatatagagatttcatatgttttagtaattttttctgttgtataactggtgtcataccaacagttgcagcaattccaagaactatacatataagagtaataaacttctttgcactactagataccattattgtctgttgttgaagaaagagtgatcagttcatgtagtaaattaactcaccgcattgattttcttatctcattaattttttctataatgttgataagttattattgtattgtacacgatttacagatagatatatagatacagaaatattatattggaaggatgggttgccagatgtgtatggagttatcattactacatgaggcaagtgttggaacatccatatcaggagcccaagtaacatcattaacaggtagtaaatgacctccatgaacaaatataggtgtaagaagatcttcagtattccataatacaactgttgaatcaactgatgatgaaacaagaaggttactcttattaggtgaatatttagtagcagttatggaatctttatgttgagttgaattcataattggaattgaatcatttcttacatcaaatatattaattaaaccatttgaactacccgaaactaattgtaatgtattaaatggattaatatcaactgtatttaaaggttccttactaataaattctttaacacgttgagatgatgaaggatttcgtatatcccaaatagtacatttaccatcttcaccaacagatgcaattaatgaattatgatcaggtatccatttaatttcattgacaccataattatgtgcaggtatatttaaaattggttcagttaatgtacaagtttgatttgttgttaaagttgaaaatttcttctttggaggtggataaaattgagattgtaaatcccaaattgcaattataccatcatttgcagctgttgcaattgtaaatttattaggattccaatctaatgtccaagattctgatgtatgatatttaagtagtatatcacaagtttcaatagtagatatgacattatcattatcactattattatcattattattatcactattattattattatcattatcattagttaaatcttttatattaaaattatttggtttacgagttctatcaaatatacgaactaaacctgaatctgaagaagttgcaagtaaatctgaatgtaatggacaatgtttaattctattaatatcaccattatgaggtatacgttgttgtaaaccaattgaattagtgacagttttaatttcaggttcatcaattaatacatcagtatcaattttatgtaattcttttgtattctttaaatgaggtaatggaagtgaataattaaattcttctttatcaattgaataatcaaaattttgtaaatttgatgaattatttgaatttaaatcaattatattagcattaactaaaagtaaagattcaattgaattaacattgttggagaatgttgaaatagctaatttctcaacattattaacatccttatttgaggagtagtcattccttgacgcggttttaccagtgtttggtaaccaatctatagctaaggatggccatagaagggaagatgtctgtatctgaaggtagttatagggggtattcttcttccaagtggaatagtccataattataattatcgtaagatctatatatattcctatatacaaaacctgtcctggtataaagcaaagacccatgtaaagatcatatagagaagaccaataaagaacgtgttttgccctctccttaaaaattttgaaatttggacacagcgtttgtttatagttggctcatcccactatttgttgtctttttaactgcttttacttcttttcttttcagttttacaaccaaaatgtctaaacacgctaaatcacaatctacatttgcttttgaaaatgctagttctaatgttgcagcttctcaaatgagaaatgcattgaattctttagttgattcatcaaattcatctcaagatatttcagatgaaactaaattaagattcgaaaatgaaatggattcattctttgccctatttagaagatatcttaatgataaggcttcatcttctaaaacaatcgattgggatttaatttcttcaccttctcaaaatgaagttgtcccttattcaactttaaatgatgattcatcaaataaaaattttgataaattagcagtgcttaaattaaatggtggtttaggtacttcaatgggttgtgttggtccaaaatctgttattgaagttagagaaggtcaatcattccttgatttatctgttagacaaattgaattcttaaataaaacttttgatactgatgtccctcttttattaatgaattcatttaatactgataaagatactgaattaattgttaaaaaatatcaatctcatagaattagaattaaaacttttaatcaatcaagatatccaagaatttttaaagataatttattaccagttccaaaaagtattgatgataaattagatgcttggtatccacctggtcatggtgatttatttgaaagtttagtatcatctggtgtattagattctttattacaagaaggtaaagaaattttatttgtttcaaatggtgataatttaggtgcaactgttgattctaaaatcttaaatcatatgattgaaactggttctgaatatataatggaattaactgataaaactagagctgatgttaaaggtggtacattaattaattataatggtgaaattagattattagaaattgctcaagttccaaaagatcatgttgaagaatttaaatcaattaaaaaatttactaattttaatacaaataatttatggattaatttaagagcaattaaaagattagttgaatcaaattctttacaattagaaattattccaaatcaaaaatcaattactgttggtaattcagatatgtcagttatacaattagaaactgctgtaggtgcagcaattagatattttgataatgctcatggtgtcgttgttccaagatcaagatttttaccagttaaaacttgttctgatttattattagttaaatcagatttatttaatttacaacatggtacattagttatgaataatttaagatttggtggtgctccattaattaaattaggttcagattttaagaaagtttcaaatttccaacaaagaattcctcatatgccaaaaattattgaattagatcatttaactgttactggtaatgttttctttggtaaaggtattcaactaaagggtacagttattatagtttgttctgatggtcaaaaaatagatattccaaatggttcaattcttgaaaatgttgtcatcactggtaaccttcaaattttagaacattgattaattattcaattattcaattattctccttttgcattgattcaatataaatttttgtttaaatgtttagatagtgtttaaaacaaattttatatttcatactttaaatatattttaaaacttaaattatattattaatattattataaaaacttagtataaaatgtaaaactaccttccaaattccaatgcacgcatttcctttccaagctttctcttacgtttacgttcgatagatttatttttttgtctactatccatactctcaaatctatcaacaagtaaaactttcctcttctctgctctagttaagaatttcataccaccattttcttccttttgtttctttaaataagttcttaatgcttccttttctctatcctttttctttaatgaatctaatttagatcttgtactttgtaatttatattttaaatcttcaatttcattatctgtcatacgacttaataatttcttatttttaagaattttctccatttctaaaatttctttctccctatattcatctaaaaatgcatattgtttcctaacaacttcataatcaacagatttacctaatgctgtatcaaatctaacatctctattaccaaataatcctccaattgatccatctcctgtataatctttcttaatttcaagtcctggaatatctcgtacaacacttacaggtcgtttactaatttttgtctcctttggtgcatgtttattgttcttcttcttaatcggttgattagttggtttcttaactgatttttcatcttcactgaaaaaatcttcttcctcagattctgatcctgattcagcttcggaatcaatttgattatcaataaatcctccattggtttcctcaggtcctgaatctgaatctgaatctgaattggaatttgatctaggtctaggtttacttctatcttcatttctgttggaaaatccgcctctacctctaaatccacctctacctctaccttcaaaactacctcctctacctctaaatccacctcttcctcttccaccaaagttaccccctcttcctcctcttcctcctctactaccacctctacctccaaaatctttacctctcatgtttccacgactattgcctctgaatccaaccattgtcctgtgtagaaagaggtaacttaaacaattaaaaattaaaagataaaatttcatgaaaaatatttttttttcaaacctattttcatggtcggctcaacaaacttagtatacatttttcttgttttcaattttaatttcagttttgtaaaagctatacaaattctttaaaaaaacagtgcctattctaattatatatattatattaaattatttctctttatcccttgataaaataaatcctttgcccaaatcattcacactaattatattacgaatcacatattaagtgaataatacttatataaaccacgtacacttaaatcattaccaaaatctttatcctgtacagcataaccaacatcatcacaacaattaattttaacacatgcataacctaataaatttaaccttttaattctatttaaaactaattgacctgtattaatatcccattcaactaatcttgcacctgcagtttcagtttcataattatcataaaatttattatcattattatttaaaattctatgaacccaacttcttcttgaaatacctttattattgaaaactctccaatattcttcgttttgatcattttgatctattatataattattattgaaatttaaattatcataaatttttaatttgaaaacatgtgctaaattatcagttaatgaaggtttaacttcgaaaatttctatatttcttaattcaattataatatttttcaattttgcaacaggttcttgtactggatgaaatatctaaaaattttaatttagttaagcaatttaaactacttaaaatttgtaaatcttcaaaatttgaaaaatctaaattaacatcacaaatacttaaactctctaattctgtaaaattttcacttatctttttaatatgatcaccattaatatttgcaaatccatttaaatttaaatatcttaaatttggtgcaccatcagctaaaatttgtaaaattgtatcaattctttcagtacttaaagtttcacttgagaaacattgttgtaaatttaaccatcgtaaacttgacacttcatttgaagttttaataggtttattattgttattaatattttcttcctcttcatcttcattttcgattttaacaccacatacagctggatgttgtaaaaattttaaaaattcttgaaatgtacctaaatgagaacatttacgtaaagataaatgagttaatcttgtattttgatttaaaaattgatttaaagttttcaaagtaacttgagtatgagctaaatctaattttttcaaatttggtgtaaattttaaaattttatcataaacagttgaagggaaatcaagacattcatgaaatgataaattttcaatttttagattatcatttatagttaataaatcaaaataatcagttaaattatcatttgaaaaaccacaaaaatctaaagattttaaattttttaaattattgaaaatatattgtaaaatttcataacttatatcagtatcaacactttcacttaataataaagttttcaaatttttattacataattcaagacattttaataatgttacatctgttaaatttgggattttataaattgattcaattgatttacctaaaccaacagcagtaaattcttggaaatctaagtattcaacataatcacctaattcattagtattaattaaatttattaagaatttactaaatgcaaaagatctaataaatttacaatatttgtattgatattgacgacaaagatataggaaacctgaattaactaacattaaattatctagatttgagaatctaccaagagttaaatttttagcactacttgaaattttagttttctcaatttcattagtattagtattattattattattattattattattataagtaccactaatattctcatttttagaaactgaagtttcattatatatggaaagctcatttataacatgaggagcatccatataataagcataagaaatgattttttcagttatttcaattgaaaatgggaataatttactaagtttattaacatcatctgtatttctaataagtatatctaaatttaacaaacttgcagttttagaaatatttggaattgaggatgagccttgatttgataattgttgattaatattgatattactattatttccagtagattcgatattacctaatgatgatattggtaaagttgtagccattcaaaaaagcgggtagttaaagagaaagtagaagagatatatgaggtcatgagataaaagataaaggaaaagaaaaggattaatattaaaataaagatcagcaattagaaatgtcacttttgttttcaacggtgaagaaaaagaaaagaaatttcaattttccgcactttgaaaaaatttaatttttatctccgctttattggaagatttactgttattattaaggggcattggatgtgtatgttaatattgtataatgaattgttttgtgattatgtagaggagtaagtatggaaaaaggctaaccgctgttttttatgtagtttttgtaaaaaaatcttataaaattagaaaataaaaatatttttttagagataatatttttgatattttaatgttgaccaaagacctttaaaaattagtcaaaataatcattgctttaaatcattaaatagttgaaaacaaacatttcttttttactcactacaaatcaatatggctgcttacgtcatcacaaatacaattacagaaagacaacaaaaatttaatttcacgtaaaagggttaatggtctagtggtatgattcctgctttgggtgcaggaggccctgggttcaattcccagttgacccctttattttttctaaaattattgctttaattttaattttactaagtcaagttaaatttttttactttagattactgattaaaaatttattgattttaacaatcaaacatccactggtggatagcacttcttaatttaatagatttactatatttttcaccaatgaaattaatttaattaaagcttatttatcgtatcgtatattatctaacatcaattatccctaataggaaactcacaaatcgagtaattccattccattatccattgacaatagaataattataaataaatccagttatggaaagtaattccagatgccaatgggaaataatcatgctatattgcccactgtagagtgaagtgcttcaagtttcccttttgagaaggaggaagcgctaacagtgctaagctattatttatttttgcgacgggggctcgtcattttagaggtttattgtgcggatcttattacccttttaggatatacgatgcatttttatctactaactatctattccatcaattttaatctatagttgataacagaaaatattgttaaatttttcaaacaagttcaattcatttgaaacaatataaaagagatgttatgtctttaatttctctagtccagtgtcaatcattcttccttttttcttttcttctattctcctctcttttctttctctatccaaacaagaaaaaaatcacttgcaataatgaatagattatcacaaattgcaggtcaagcagcttcatctgttgctccattagcaaaaccagctcatcctttagatcctttatcagttactgaaattaaagctgcaactgatattattaaagaatattttgctggtaaaactattgcttttaatacaattactcttaaagaaccaactaaacgtgcttatttaaattggaaagaaaataatggtccattccctccaagaattgtttattatgttattcttgaacaaggtgttccaggtattaaagatggtttagttgatttagttaatatgcaagttttatctgttcaacctttagcaaattctcaaccaattttaactgttgaagatttagttggtactgaagaaattattagaaaagatccaaatgttattaaacaatgtgaaattgttggtattcctgcaaatgaaatgcataaagtttattgtgatccttggactattggttatgatgaaagatggggtgcaagtaaaagattacaacaagctttagtttattatagacatgatgaagatgattctcaatattctcatcctttagatttctgtccaattgttgatactgaagaaagaaaagttatctatattgatattccaaatagaagaagaaaagtttctaaacatccaaatgctaacttctatccaaaggatatgattgctaaatatggtaaaatgagagaaggtttaactccaattaatgttactcaacctgaaggtgtctctttcaaaatggatggtaatttaatgcaatggaataactttaacttccatattggttttcaattatagagaaggtattgttttaagtgatattcattataatgatcatggtaataatagaccaattttccatagaatttcactttctgaaatgattgttccatatggttcaccagatttcccacatcaaagaaaacatgcattagatattggtgaatatggtgctggttatatgacaaatcctttatcattaggttgtgattgtaaaggtgttattcattatttagatgcacattttgctgatagagcaggtgatccaattactgttaaacatgctgtttgtattcatgaagaagatgatggtttattatttaaacattctgattttagagattcatttggtacttcaattgttacaagaagtacaagattaattatttctcaaattttcactgcagcaaattatgaatattgtatttactggaatttcttacaagatggtgcaattagattagatgttaaattaactggtatattaaatacttatcaattagatgatgaagcaggtgaaaaatctggtaaatggggttgtagagtttatccaaatgttaatgcacataatcatcaacatttatttgcattaagaattcatccaagaattgatggtgatggtaattcagcttcagttgttgatggttcagctgctgaagaacctttaggctcaccagaaaatatgtatggtaatggtttctatgcaaaatcaaaaacttttaaaacagttaatgattctttaacacaatttgaaaatggtagaacatgggatttatttaatccaaataaggttaatgaatattctggtaaacatccatcatataaattagtttcattccaatgtccaccattatttgcaaaacctggttcattagtttataagagagcaccatgggcacataatacagttcaagttgttaaatatgaagaagatagattttatccaagtggtgaacatgttcctcaatggtctggtgatggtaatattggtatgagaaaatggattggtgatggtagtgatgaaattgaaaattcagatattttaatgttccatacatttggtatttcacatttcccagcacctgaagatttcccattaatgccagctgaaccaattacatttatgttaagaccaagacatttcttccttgaaaatcctgcattagatgttttaccatcacatgcaatgacaacaagtgaagcaagaaaagctggtaataaagaaattgttagtttaactgatacaacttcaacatatgcatttaaggatactccaaagcaaggatgttgtagtagatttaccaaggaataattcctaatttgatattaatttgtttataattgtttttttgtttatctctttaattttaaaatctgccagtcagaatatttttttataataatataatattaatatttttaatacactttaattgaatttatttctttaactatattacacttaatatacacattgatatagaattacaaattcccatcttgtttttttaatatttataattcattcccaacaatttcatcaaattgactaaacaattcttccatttggtcagctgccaaatcttcatcttgaatatcattggtattatttaagttattatcaaatgtagaggcattattcccattgatgttagtatcagtaccattattagtatctgtatttgtatttggattattattattatttggattattattactattattattaatattatccaaaccttcaatatcttgcattaaatcacccatttcatcatcttgtaagaaatctaaatttaaatcatctaattcatcattttgttcaaaattcatataagaatttgcatttggatcattaatattattaacatcatttgaaccattaatatcatttaatccatcaataccattaatatcgttaagatcatcaagattattaagatcattattattattattgttgttggtatctgtagtcataagatcttgaagttgttcaggttgttgaggtaatgattgctgaggtactggctgttgttgagttactggttgttgttctatattatttgtatcattatttaaactacctaattgttcatcagagaaattaaaatccattatatcatttgcggcatcattattattatcattatcattattaaagtcatttggaacattatttgaactcaaatcaaaattatccaaatcaaggttcattatcatatcattttgattatttacatcattattaatattaatattatctatattgatatcattattatttgatgtaattttagattctggttcaagtttaatatcaataggattgttgttagtactactattattattagtgtcattatttaaagtattattactattactattattattattattattattattattattattattatcaaatttcaatttttcagaatcttgtctaattctttgttgttccctcttttcttttaaaattgcttcctttgaattttttattttaacactttctaaaatatatttacaatttgataaatccatataataatcatcaattacttgattgaaaatattataatcatttgttaattgttctgataatggagctaataaagtatcattattatttggtattgtcatatcaatagcagttttagataatctataagtagcagcatccaaaatagcggctatagtgataaagacattatcagcagcagtgtctaataagttttccattgcccaaatataaatgttattctctaatatcctaactcttattcccttagatatataccaactttaatcctattcatgtagtaacaaaaatcaaagaaaattcaaaaaccgtattacataatcaaaaataaaaagacgcgactgcattacctaatcacacaaaaatatatatattaatatattacaccagtacacttcactttatttcttaatacaaccaatcaaaattgccactgagagcgaaatacttgaattgcgaaaaaaatacttagcttagtatgcattgaatgaatatactgaacgatacatagcatactttcattgaattttactatctcatttcacatccagaatgttcagacaaaccatcagagccgtctcaaaggttaacagagttaatgctgttagaacttatgcagaagctgcttcatctttaaaattatcattctctatgcctcatgatacaattttcacaaataaggaagttacacaagttaatgttcctgctttatcaggtgatatgggtattttagcaaatcatgttccaattgttgaacaattaaaacctggtgttgttgaaattttagaaggttcaaattcttcaaaatttttcatctctggtggtttcgtttcagttttaccagattcaaaaatttcaattacttctgttgaagctttcccattagatgcttttgataaatcttctgttaaaactttattagctgaagctcaaaaaaatgctgcatcttctgatgaattagttgcagctgaagcttcaattgaagttgaagttttagaagctttaaatactgctttaccataagttaattaaattaaattaattatgagaaagagtttaactctctatctttcaaaaatacaaatacaataattttactaagtttgattacaatttagaataataataataatcatattcacacaattataacacccccccaacatattacatctatttatttatttatctatttatttattaacttacttatttatttatctattataaatagtctgtttatttatttatatttcgtttaaatgtcatgaaatcattgatctgaattagtatagtacagtatactatagtatagtatagtatagtatagtacttctattcttcggaaatttaataattgctacatggaaatccaaatttccgcaacgcgtaattttcttgtaatcttttttaacatgcatgttttcctttttaaagagttaatgctcagttcaattctaattgaattatcataaaatatactaacatatcatcagatattaccctgaaaaatggtatccgcaagaagaaaacgccatacagttagttatgatgattcaacagaactttctcaagttgaaaattcatctaaaagaagacgtgttataattgatgatgatggcgatgatgatatcgatgaagaaatggaaattgaagatttcttagatgattcaagtgataatgatgaatcatataaatcacaaacaaaatccaaatatagatcaaaatcaagtttaaaatcaagtttaaattctaaatcaaaaacttcaaaaagatcaaataaatctttatcaaatagattaaataataaatcaacaacaattgcttcaaatattgatgaaattgatgattacaatgaaaatccaatatttcaatcattaagtaatggtgatttgacttcatctcaattagctcaatcatggtttgatgattttattacaaatgatttaaatatcaaattcgatgctttaaaagatttattaaattttatacttagatcagctggttgtattgttcaattgagtcgtcatgatgttacaaatagtgaaactgctaaggatacagttagtgaaattcaaacttcatttgcaagacaaaaatatcatgaattcccaatgttatatgctcctgttaataaaggtaaaaagacaaatattgattggaaagaattcccaattaatgcattatcttttatttcttctattatcttaattgcaagtgaatctggtattttatatgaagaagataatgaattgattgaattattattagaatggatcggttcaatgtcaacttctaatattagagctttaagatatgtttcaaccattttcggattaaatattcaatcagttttatgtaaattatcagttaatatctcaaaatttattgataaatttttaagacaattaaagaaagaaaatgatagtttacaattattaattgataattcaaagaagaaaaaagtttcaattcaaacaaagagacagattgactgctattgatgatagaattaagttgattaataataatgttgaaatgtataaaaagcaaaaaaaaattgtcgataattatattaatgatttctttaatactttgtttgctcatagatatagagatgttgcaagtgaaattagaattaaatgtgtaacctatcttggtgaatggatggatgattatcctgaaatgttttctgaaagtttttatcttagatatcttggttggttattaactgatcaagattcaaatattagagcagaagttttcaaagttttaattaaaatttataagaaaagagttacagtttcatcattatcacaatttacatcatattttaaaaataaattaattgaaattgtcatttatgaaacagattttggtacaagattgaattgtttacaattattaaatgaaattattgataaaggttatttaaatgatgatgatattattcaaataacaagtttgattttcattgataatgaagatataatatacccattccaaggttcaaaattaaatcctggtaaattattaaaggaaatttcaaaatttttaactaaggttgaaactaatatgacaactgaatttttagaacagaaaagtattgaattagagaagataaatgaagttttatcatttgattctaaagattttatcaaatttaaattcttactacaaattgtatcagattcttatgaatattataacagtacatattgtaaggagaaaataaagtataatatagaaaattgtaaaattaaaaaatttacaaagatattccaatctatctatagtttgaaaagatataatgaaaacaatgaaagttttgaattatttttaaattatatcaattttgatttctcagctatatcaaaagaatattattactgatgatttaagagagagtttagaattagattcaaattatcaatatttcttattaaatttaataaatgcatcatcaaagatttattgtgaaggctcaaacaacgaatatcataaaactttattcccatatatcaaaggatcaaaaaatgttattaatttgaaagattctacatattatgtatcaaaattattaatagaattatctaaaataacgaattatttccattatgatattgataaaatttcagtattgattgaaataacttgtaatatattaaataatatgtcatcattaaatatgaatgaattaaatattaaagggttgaaagatacaattgtaacaattttacagattttttccagttattaatttcccattaacaccacaaaagattaattttaattctgattattttaattcaattacttatcaatatattcaattatttcaaaaagtaaataatattgaacttgatttgaatggtccaattgatttattatttagtgaaacttcaatgtcattagatactaaaattgaagaaaatgatagtaaaataattgaatcaataaatagattatacattttacaattttcaatatcaacacaattggtatcacgtatctacaagaaattatcaacaattttaaacaattattcgaaatcactatatttccgaatctctaaagattcaacatataccaatgaagctgattcatacaatatttcaacacctatctcacaacatgaattattttcatttttacagatttctaccacatacataactaattcactttacaatttctacaataataaatccaagaatgaactaagtgatttaatatctgttaaaaatacaatttcttgtataaatacaattcaacaatcgttatcattgttaattgatactcaattacttaattcattaacaattgatcaattacatattatttgtacatcatttattgaaaatgcatttacaatttctgcatttaaggcagaatatagttcattaactaaaagtcaacaactagaagatgaatttgacgaaactatgatgtcattacgtagttatatcttacctactattcaaacaaatattatgaaattatattgtattagagaatttcaatatgctgaattaattaacattgagaataaacttgaacgtgaagctgatgaagatgttaattttacaaaatattcagtatccaatgatgaagatatcgatgaagaagataaagaaaagaaaatacgtttatatgaaacttatctttgtgaaattgcatcaaaattagtattatcatgtaaattaaatttaataattgattcaaaggatgcagataagataactaatcgtattcaacttaattctaaatggttaaaaaatgaaaataaaaacataggtgaaatgtattcaagagtaatggcaggtgttggtattttaaccgctttagatgaggttaataatgaaaatggtaaaactaaacaatcaaagataactaatgttaaaataagtaaaaaacgtaaacttattgatgaagaaagtgaagatgacagtgaacatggtgaagatgagaatgatccgattgaaaattcagacgatgaacaagatgaaaatgaaaatgaagatgaaaatgaagatgaagatgaaatgaagatgaagatgatgaattgaaatgaagaagaagttgttgaaaaagaaagagagagtagtgaagaattacgtgatgaaaatgatgaaaatatggagtttagtgatattgatgatgattcagtcttattaccgcaatataagaacaaaaggacaaatactacatcgagtgaaattagttcacttgcatcttcattcccatttacacaataaataataattttgctcagtataatgataaataaataataaattttgctattataagttaatcaaacgtagtcataaaaagtgtatttgtattatataaaaaaattaattaattaatattccaaaaaagagaggattcataaattttatatagtagaagaagtgaaaatgaaaatgttaaaacaatcattagttttgtagctatttgtcaagattctccgtaagaatagtttttcaaaaccaattaatttgctttattaatttcctaaatgtgaattttcactatgttgtatgcatgtatattgtatattatagtttcttaaaatgatttttcaacaatatcagaatttaaaggttgagtagcaggatcttcaggtgcaatatcgaattcttttcttgtatttggtcccttgataattttattagaaataacttttaacttatcaagtttttcaccacgaacaactttttcaatttcatctttattaagagtttcatattctaataaaccttcagctaatcttttcagttcaattcttctattatgtaataattctttacaacgtttctcagattcaattaaataatctcttgtttcttgatctgctaaatcttttaattttggtgaccaagtttcccatttatcacttaatttaacaggtccaactttatcactcataccataacttgtaaccattgctcttgccataccagttgcagatgataaatcagatgaacaaccagaagtaacattatttggaccatataacatttcttcagcaattttaccacccatacaaacatctaatcttgcaaaacattcttgtttagtaatatcatgtttatccatttcaggtaattgaaatgtaacacctaaagctctacctcttggtaaaatagttgctttataaagaggagttgcaccatttgtaaacattgcagcaattgcatgaccagcttcatgataagcagtatttcttctagtttcttcagtcataaccattgtttttctttcaccacccatcagtactttatcctttgcccattctaaatcattcatattaacatttaaagcattagtttgagctgcatgtaaagcagcttgattaaccaaattttttaaagcagcaccagacataccagttgtttgtcttgcaataattgaaggatcaacatcttttgcaagagaaacttttttaagatgatgttttaaaatttcaattctacctctaacatcaggtaattcaacaggaacaattttatcaaatctaccaggtctagttaaagctttatctaatgaatcagggaaattagttgcacctaaaataataataccttcagtttgtgagaaaccatctaattcaactaataattgatttaaagtttgcttagcgtaagcttgatcttttgattttcttttacctccaatagcatctaattcatcaatgaaaacaattgcaggagctctagctcttgcctttgtaaataattctctaactcttttagcaccaacaccaacatataattcatcgaattcagaacctgacatgaaaaagaatggaacaccagcttcaccagcagttgctcttgctaataaagttttaccagtaccaggaggaccagttaacaggacaccttttggtaattctgcacctaatgaaacatattttgaaggatctttaaggaaatctacaacttcctccaattcagactttgcttcatcaacacctttacaatcatcgaatctaacatcagaatcagtaacttcaacagatttatcatcatttgagccacttttaacaattgaaccattttcaactaaaacattaaaaccataataagctgcataagagattaaacctaaaggaattaaccatttaatccatctagagattgacatccaataagtttcagtaactataacatgaattggatcagtttttgtaccagtattagtatttgaattgttattattggtatcattattattaatatttgaagtagtattatttaaatttggtaaagggatattattagtattagcaaaagtagttgccttttcaatattacccatttttaataaggcttctaaatataattttgaacaatctaaatcatttgatataccattagtttcatatcttgaaacaactatatgaggataacttgcatctaataaagatctataaaaagcagcttgtaaagcaggatttgataaagaattatttgcatcttgttctaaagcagctaaatcttgagttgaaggtatcgttgaagctaatcttttaaatgataatgaagataatgaagataagcgattataattctttaataaattataatttaaagttttagataatattggacgtgatataccccttgacgaacgtaataacatacgtacaggtgaagacatagttgtatttagtgatataaaacgaaagttattaaatgaagttgaatgaagttgaatgaaattaaatgaaaggcagaataattaatagtcaagggcaaatttattgacgtagtaaatcatggttaaaaatgctcagctcgactgactgtggtgtaaagttcggaattaaaagaaaaaaccccaattgtcggagataacaataaaaaacaaaacagacgcgtctacacaaaaatatataaaataaaacagacgcgactattataaaatgccattacgtaataatataatataataaattataataatatagagcaattccgaatttacccgcattaaccaatggaaattcgctaatttcaaataatgctattatttactcattttccgtccatttcactcctaatagttttgctattattatgatttatatggaggggggtgtttttcaatttcatctttaaaatcttcttactcttttctttctttcttttcttttctgttttatttaatccttctcttctcttacttcttttgtctttatttcctttaataacttacattaatataatcaaaaatgccagctccatacgaaaaaggttcagcaaagaaaggtgcaactttatttaaaactagatgtgctcaatgtcatactattgaagcaggtggtccacataaagttggtccaaatcttaatggtgttttctcaagacattctggtcaagctgaaggttattcttatactgatgctaataagagagcaggtgttgaatggtctgctcaaactatgtctgattatttagaaaatccaaagaaatacatcccaggtacaaagatggctttcggtggtttaaagaaagcaaaggacagaaacgatttagttacttatatgctcgaagctgcaaaataagtaattcattaatttgttacttattatactacttgaatatagttttattaattttattaaacattaaacattaaaaattattatttagatttaatttattcataatatattattatctcccttcattatattattattattattattattatttattcttttttatttatttacgtttttataaatgaaaaaaaaaataatttaacgacatcaaaatctaatcttcttctaatatcttctactaatatattatatagactatacactatttcttcattatacgtaaactattgtccttactaccaattgcaacaatatgcttaatttcaccactttcttcaacttgaaccttatttgaaatactaattctactaatactatctcctggtaaatctctattttcaatagcttcaatttcttcaaattcattcttattaacatcaactctataaataaatatcttaccattatctaatccaataataactttaaatattccattattattaatcttaactgaatcaattgctgtaactgcaatttcaaattttatactaccataatttttaacttctttactctcattatccatcttccataatttaacttctttatctcttgaacatgttaaaaatgaaattacttctccaaaattaacccatgcacaatcccaaataattctactatgtgccttttccattattttaattaattcaaaattttcacctcctaatctcttccataatgaaaatttacgatctcttgaaactgataataaatattcatctttattatcttcatcatttaaactatatcttaatcttgtaattgttaaatcatgtgctgataatttatcttcacattctaaccatgtttcactattaaaatttctaataactgaatgtctactaacatttgatctacatgcacttgatataatcttaccatcatttgaaacatcaacggttgtaatctcaaatccatgtccatataatttctcaatttctggccataaagtatgacgttgtaaaatatcttcaattggtggttcaataatttctttaattccatctcccttatatccaccatcatcttcaccatcatcaccatcttcaacaccttcaggtttatcattctcagatttattacttaatcctaaaactggtacacttgcatattcaggtaatttttcaccatttaattgttcttcacctaaactttcaattccacaaaatttatttaacattgatgcaatactttttggcatatcaaaaactctaataattttttcatctcctgcactgataaatcttgtatcactaatacttttaactgtaatcatatcaaatccatgaatttgtggtctaccgaattcaaaccatttataactattttttggtttacaatataatctagtagtttgatcatatgatgtaactaataaataataaccacctttagaccatgaaatatcactaattggtttcattggtccatttaatgtggtctttgtttggaaaaaagtttcatcaccttgtttagtccaacaacggaatgatccagttttaccattagttaaaataatttcaatatttaattctttattaattatccatttacttgaataaaatccaccagatgaaccagttgcagttgatgcacccttaattgcaagttcacctaatctaacttcaggaaaccaaacacctgttgatttgtcagcttgccatatcataactgaactatcagcacctgatgataataacattaattcttcttctttattagtatcacccttccatgaaacttcactaacccaatcatcatgtcccattaaaattgcatcaaggaaaatacagtatctatgatttaatgtctcaaatttatattcctttgatgttaataattttaatttatttgtttcaacataaactggtgtattggaatctttaattgttaatttccataatctaataattctatctaatgaaccacttgcaaatataatatttcttctaggatatgtaatatcatcaactgtttccattatagtttcaatctcaacactatcaatagttcttacccaatcatcatgtcctggtaatgaaagttttaaatcaattaaactttctgaaatattaactgataaaacattaataactggttttgaaccaccacacaatatgattctttcattatcactaattttaattatattcataaccattgcataatatccatatggtaattcaaaattacataactcagtaaataaatgttcttctctattgaattgataatagtaaacaaatcctttactatcaccaataataaaatctaaacattttgaatcgttcttagtaaatccaatacatgaaatactatcctttgtaggttttaaactttgtaataatctaaaaccatcagtttgatatttccatatattaacagtacctgtaatatcaccggaaaataaaatatcagttttctgtaaccatttaacaaatgtaatctcaccattcttgatattatttgatgattttaatgtttcaataacttgagtttcaactgtatatccattattatcgaaaattggacatgtaattgaaacggtattatttgaaccatatgctaatattttttgattctcattataatcaaagatcccaagtgatctattacaaccggcaaatatactctccatgttgtttgctaaagaggaggttcaagtgaaagaattataggtataaataaactattgacatagaaaatatttttttttcatcaaattaaaaaatgttcctcattttcgaatcctatgtaaaatggatagcaagctcaaaactacggagttgaataataatacaggattagtataatctatataatataaaaaaacgtatttatactaacatggtaatagatcaataccattttctaaccatcctggaccagccaggatcgattcaatactacaaccttcattccaaactcttttaacaatatccatatttgtttgaattgtacccattttaacattttcatataaagtttgtaatgctttccaactatgttctctattattatcagctgaacaaactgcaacataaaaaattggccaaaccatttgtgtaataattggtgaagttgaagggattgtattataaactgataaaaattcagtaattattggaattgattttgttgatttaatatgatatcttggaattgcatcagggaattcatttgatgaaagaaaatttctattttgttcattccaataaggtaatttattaaaataatgtaattctaactgaattgtaagtaaaactcctgataatgcccataattgaccacattttaatctatcaatataagtaaatgttgaaccatgtggtaaaacatataaaacatgatcacgataatgtaaaaatctatcacgtaaatcaagtaatctttgataaaatatacgtacatcttgtaataaaattgatttttgtgaaaataacatcattgtatcctgtctgaaaacactcatatcatataaaactctaaaaattccaactggacatccattcattttatcagttgaaattatatcagtactttcaccaaaccattttggatcacaatatggtattctacaatctggcgatactaatgatgacactgtatcaaaccatgataaaacacataataatgattgtgattgttgaatttttttcatttttttatgaaataatggatcacttgcaattgatgatgctaatttaagaaacattctagctaatgctgatctaccactctcaagaaccgcaaataaaagatgaacgtataataatagtaaaataatcataaaatttgtaccttttttcttatttgattcagatttaattttatcaataattttaggtacatctaaaccaacatcttgggtatcatctaaacttatatttggctcgttatcattatcactcccactcccacttccactactactttcatttttcatattattattactctcattattttcatttttattattattatcattttcgttatcgttacaattttcatcattttcagatgttataccaccagctctaacatatttaattaaatattccattgtattatttatatgcattaaaccttttttataaaattcatcaccaccattattaacatataaatgcattgaagaaagagaaaggaaacatgatttggctaaatccattgaaccaaatttcaacattaacttgaggccatggagcttgtggatgggcatctaaaaggaaaataactttttcaaagaaatgcttcaatatatgactttcttccttctttttcaattgaggagcaggtaaattatcaatagtaactgaatttaaattactcattgtcattgaatgaacatcaactggaggtggtaatgatgaaacattttctaatgtttcagagaattgtgaatcaattgaatttaataattcagtatcataattatccaatatataatctaaacctgataaaaatgcatgttcaaattgttgttcattattgaagtctaattcaaaatcagtttctgaaactgtagagctagtaggtaaacttgtagttcgttcaagaatctgtggtgtctccggtgatatcacctaatgaattattgccaatagtatttatggtatttatactatttatagtgtttatactattcaatactattcatactattgatgctattgatactattaagactgttcatattcttcatactgacactattgacactattactaggtttcatttgtgtattcattttaactgtatcatcactagttaattttggattaagttttgatggattatagatataccttgaaggagaggaagcattttgctttggacgacccttaaatgagattttattattaatattattcctatcatcactatcaacatcaaaaactaatctcattccataaccttcacattgtctacctgaatcaacacaattcttacaaaatggtttcgtctcatcacatttacgacgtctacgtttacacgtaaaacaaccatttcttgatctagttatctttttccccttagattcagccattttttgggtattcagaataaatcaattgagctatttgtgagactattcataaaatgaatgcttatctatattatgttgttaaatcagatttccacccaaaaggaactcatcgacatcagcaaatgataatttaaactacgataattcatgttgatagtggatacactttccctaaataggcatcttattccgccagccggaatttttttttcactactaagattcactattattagactctcggattaaattttataagggcattttgtaacgattgttaaattatgttatttgttaggaattgatattaatatttcattaaagaaatttggttcaaattttataaatacataagcgtataaaagatggagaattataaatataagattaagtttaagtttaaaataacaaacaacaacctgattataatttttgcatagcagcaacatccatagattgaacccagtcttcaccttcttcaattgcagcttgtaaatcatctaatgaaactttatcatcttcaacgacacagttaatttgtaatttcttaataccgaaaccgactggaatgaaagttgatgcaccccaaactaaaccttccatttcaatggatttaacgtggtttaacatagcatctaaatcagtttcatcatcccatggcttaacatcaagagtaacaatagatttagcagctggctttggaccctttgcagctttcttttcattatatgcagcaattctttcagcctttaatttagctgcagcttcatcatcttcttcatcatcagaaccgaaaagatcgacatcatcatcatcttcttcttcagcagctggtgcagcttcagattcagcagctggtaaagtttcaaattcttcggagaatgaagcaatgtgattgaaccatcttgagaatgatgggtatgcagtttggaaagccttgtatgcagcaacatcagcttgagatggtgcagtactataataaataaagataataaacagattctatgttagtattatgattcataaaagaatttatctcactattcttattatcattatatttatcaggtgtaagtaaagattttatatttatttgatatttgttttgaaatgtaagaaaaataaaaacaaaaaaaacaaacatttttggaaaacaatagctcagtgaaatggctgcgtcaacaaccttctttttgatactcatacagcgggtcttgagtccgcctcataaacatggaccaaagaattcaatcatcattgcgaataattccattaattttgaaagaaaattaacaaatgaaaacaaacaaacaaaacagtcatatcaaataaacaaataatttcatacttaataataataatgataagaataataattgtaaataatttgatttataattttaatatacatacccttggacgtaagagttatcctttaagacagcatcaagtttagcaacttgttcgattgtggagaagtttgtgaaagacatttgcaagaggaagtagatcaaagaaactcaaatgaaggagaaagaaggttcatttaaagggaaattaattagatattaaggaaaacgtgaaaaacgtccattttattaatgcagaaagccacgaccctctttcacagtgagggtttcttgagaaaaagtggaaaatggaaaaatttgaaataaaatttgcgtttcttttacagtgagtctagaaaattaataaatttctcgctcgcgacaatatttctgttgtagacatggggctcaactttaacctcattagaggtaatggtaactgaaagcattttgctttgactagatttaagtattatctcattcattactgctgtgacatggtcaaatgatttaagatattctttatatttatctggatacatggatttcataaatggtaatatatctctttcaatagacatttgtttaattgtacgtatattgaatgaataatctctaattccaataacaacattcttagttgatgaataatgacattgaatagctaatctaaataaaaatgaatcaaaataattgttacctcttgataattgtaataaaattttgaaattacttttaatgttaaaacttggaattgatccacgacataaaatcattttaatttctacataatcatgaggatcatttaaatatgcatcaacttcagaaaaatgaattgataatctatcagaaacagtagttgtatacattactttaaatgaagatgtattattaacagttttataatgttgtccatgaatcagtaaatcttcaaatctaattccaacataattcattttcctatcttgattaattcttgtctccgtattagcaattataaaataacctttatgatttaaaacataaaattttgatgctctacgtactgaaatatattgataaaatgatgatggtgtgaaaattccaacatttgggattggtttaatattcaaatacgtttgcaaaaatggttcatttttacaatcattctctccatatactaccggtgtatagttattaaatccaagtttagtattccaatgacatggttgtttaggtataatgcactttcctaattgcgatctatcgaatgtaaccttttcctctgtaatagaataaccacattcttcctttagtataggaagtggatttacaggtagtgaatcttcgtaaaacattcccactgttgatgataatatatggagaaatcaagtcttacggaggctcaatagagttaattgttacgattaatttttcactgtactcttagtctcacagtttaacaattttttttatgattttcatcccctcgccgtaaaggctcatcacaatttatgattatcacggtgtatcaaattattaaattaactatagtttattaacatattatcttctttatcaacaatgaaaacaccaatttggccaagtaactctcctgacgtttttgaaatggacgcactccatgacgttcataacaatatgcgtcaaagaattttcaaatatctaattcaaagaggttacaatacagctgcagctgaatttgcaattgagacaaacaacgaaacagccaccactttaaagccaaatttgacatcaacagcaccgccgcaatcagaagtttatgatcgacttcttttacaagataaccctgatttagcagatcaatttcatctctctgaggcatacaaggcagcacagaatggtgattatgaatcaactgttgcatctattaagaatgtcagtagtggtggtggtggaggtattgatcaactcatgaagtacattgtggctggtgatgaggagaaaccggaattcactaataatttacaagattccgaacaccgccacatcctcaccaatggcgtagcagctgcggtgtatgtggcgcagcacaaggaaaatgagaaaaaatgaaaataaaatgaaaaaaatgatcggaaaattgcgaaccaacaaatggcagaacgaaatttccgaaaacacagggtataaaatgaccaaacaccccggggaaccgagaccggcagcgggactgtggggtcgtcgcagatgatcgcttacactgaacaatttgagagtgaaattttttatcttagttattgcaattatttgattaccaatctctgtttcaatagtctttatcaatctgtttggctattttcactgtatttcagagtcaatcaattcaattagttggttattttcttctgataactttctagttttataatacattacttataataatacaatagtataataatacaatagtataataatacaatagtataataatataataatacttaaaaaaatatatacaaatgcccaatgatgaaccagtgccaatcactgtttcttcaccttcaacacattcactgcattatgttttacgtagtggtttagcaggtggaatggctgggatatctgcaaaaacattagttgcacctcttgatagagttaaaatcctatttcaaacaaataatccccattattcgaaatatgttggttcttttaaaggtttatttaatgcaatttctcatatttattcaataaatggtataagaggtctttatcaaggtcattcggcaactctactgagaatcttcccatacgctgcaattaaatttgtagcatatgaacaatatagatcttttcttatacctgattcttcatatgaaactgcgtcaagaagattactcgcaggttcattagctggtatatcttcatgtttttttcacatatccattggatttaattagagtacgattagcttttgaaactcatcaacataattatcatcataatggtagtaaattatttcatactttacgacttatctataacgaaaattcaaattttaaattaccttatacaacaggtggtatacaatctttaccaaataataattctgcaattactaaatttattcattcaactaatataccgaaaaagtttccctttcattttatcaatatcaaatttttatagaggttttcataccaactattttaggtatgattccatatgcaggtgttagcttttattctcatgatttattacatgatttattcagatcaaaatatttagctaaatacacagtttcaacttcaattcctgctcgttttaatgaaagtagacccccgttaaatacttgggcacaactattagctggtggtggcgccggtatgttagctcaagcttctgcttatccatttgaagttatacgaaggagaatgcaagttggtgcagttactgatccttcaggtcaattccattcaatatcttttactgcaaaacaaatttataaacaacgtggtttatcaggtttttatgttggtttaggtatcggtttcttaaaagttatacccatgtttgcttgctctttttatgtttatgaacgttgtaaatattatctcctgatatagtaaatataaatttgaaaactatttaactatttatttttttgtatattatccctataaatattattatatatatatatatatgaatctaattaactattcaaaatccttttcatcgattccagacttttcacacatactacgaaaaataccttctttattttcccacaatgccttaggagtatcaaattcctgcacactctcccttgtccataactaaaatacgatcataattcaaaatagttctcaaacgatgtgcaatacataaaattgtacaatctttgaaaccattgtgcaattgtatcttgaattctagcatcatgtttcgtaatcaacactacttgtagcttcatcaagaattaagatcttacttttacgaatcaatgcacgacataatgcgaataacttgtctttcaccaagtgaataattagtaccattttcttcaacgattgagtctaatgtaaaatcaccaataccaccagatgccatttctaaagcttcaattaatatagaatcatcagtttcttcaaatggatctaaattagaacgaattgtacctttgaataacactggatcttgtggaatgattgctaatttggatcttaatttaaataaaccaatttcactgatattgacaccatcaataggtcatttcaccacactcaatctcactcaatctatacaatgcagtcataattgttgatttaccagcaccagttctaccacagataccaatcttttcattaggtttgatatccagattcatattcttcaaaacaaatggcaattctggtctatatttcaatgaaacatctttaaattggatttcaccatgctcaggccactgatggagggtaatgtttgatcaactatctttttcataaggagcttcttgtggtaattcagttgcatattcacaaactctttcaactgatgatgataattgttctaattgaccaatagctcttgtacaagtaataatttgcatagaaaattgaattgcatatgatattaataaaccggcaccagctgcagaaattggatatgcatgagaaacacataacattgtaacaatcaaattaacagtagctgctgcaccatgtaatgggacagagaaccatctcattaaactaatattggcaaaataagcttcattcattttattaatattgaaatcattacgtttcataaatctttcacatgaattataaattttaattgttgtaagaccctgtaacatctcatcaaaatttgaaaaaacaaatgatctactaacaccttcaattcttttaacttctcttgatgttgcttgatacacgttaaagaaaacaaaaacataaataatcaaaaatggaataagaattgcaaaccatggcaaataaataatacaaagaatcaagataccaataacatttcccaatcccatacatgtcaaacgtgcctgttctgcaatctcattatctaaaacatcagtatctttagtaaatctgttcataattcttcctaatggtgtagtatcaaaaaatgccattggtgcaaacataattcttctcaaacaactaatatttaaaacttttgaagctttattactaatgaaaacaattgtacagaattgccaaattgcacataaaacaaatgaacatgtaatcatgacataaattccaatataaaatggattatcatattgtttaaatttccttaatgaccagaaagataaccaaacattttcaaacaacatgcagaatgtagtcagagaaattgcacaaagtaaattaataaggactacctttggaccaagtttaccacatccagactttaaatattcaacaaacattgcacctgaaatactattggtgttgatcttctcagcttcaattgttttacctactttttcatcctttgtagtttgttttctaattagtttcaattcttcagctttgacatcttcatcttcatcttcgtcattagcttcatcttccttttcatcttcaccttccatttggaaatccatcaagtttttaaatccaggattacgtgcaataagttcttcatttgtaccaatatcaatagttccatccccattcatataaataattctgtcagcatctccgatcaaagacaattgatgagttgctaaggactctagttttgttacccaaaagacctaaaatacattcactcatgatatgcttaccaactttggcatcaacggcactcaaaacatcatcaaacataacaatattgtattcatccatagtgtaagcacgatagacagttctagctaaattgatacgagctttttggccaccactcaagttgacaccacgttcaccgatttcagtcatatcaccatgcaggcaagatttcgaaatcactagttaatgaacatgactcgataactgttttgtaaatttgtttatcataatccaaaccaaaggtgatattttctctaacagttgtattttggatccatggatgagagcaaagaattaaatcaccattaatatcgataccaccttgaattctgttaatatcactattgattgcagctaaaagtgaagatttaccagaaccaatcgaaccagtaataacaacaaactcaccatgtttgattttcaaattgatattatgtaaaattgttttatttatcgatgtaccatttgaatcaacagaacccttttcagaactgttatcagttttctccaattcagtagtggaatcagaatcagaagttgaaagtaaatcatcattccatgtaaaacttccattggtaattctaattgaatcaacttgtttattaaattcagtcttaatgtattttagatcaggaatttcttcttcagccaataataaattttgaatacgcttgaaagcaattagtgcatcaccagttgaacttaaagctaatggtaaaagtgaaatatgcagcgttaaaatattgaataaagtgagtgaagagaatatattggcagcatttcttaaaccatgattttggccatacatacataaaaaaccaatcattgctgaaactaatggcaatgtaactgcacaacctgtaatgatgtttctagcaaattgaatctttaacataacgttcatttctttagatctaatttgagtaattaaattcaaaaatggaacttcccatgcataatattttaacattttcatattgtttaaaatttccttaatataactaactcttgcatcagtttgaacattaacatcttttctccatgccattaattttttagtaaagaagaaaaaacacatcgttgcaatcaaaaaatacccaacaccagctaatgatgcacctcctaaatgagttgctaacaatgcaatagtaattgctaaaccaataggtaaacatattgcaaagggtagatagcttgcagctaaatcaattttgtaaacgtcattaccaattaatgaagtaatcattgaatgtgaataaacagtttttgaccttttacttaatttcattgctttatcatgaatcaattttgtaaggacacctttaacttcggcaccaaaaacacctgctttattaaaaccatgtcctgaaagaacaccaacaaaataaacaatacatgcaacaccaactgcataaccataaccttttttacttggattttgattatgggttaaattattttcttgaacataattgataagtgcacgaatttgtaaagtatttaaacctgaagcaatatcactgattgctttgaaaaggatagctaggatatattgccaacctaaagcactgaaaattgcacgaaatacaagatacttaggatatttgaaatttggatcatttttcaagttttcacggttttcaaaagtatcttcaattccaaatttttttaaatattttctttcatgaatatctttcagtttttcaaattctttggtaacatattcagcagttgtagaaacatcgaattcactattttctgcaatcttgtataaatcttcaggtacaattgttctaagataaccgacatgaattaaggggtataaccaagcataaaaactttcagagataagattgttatgatcatatgaataaagagttctctcttcttctaaaggaattggggggacacttttatcccatagaagaaaatgtaaaattcttttctgaggttgaatacgaggatctttagcagtacgtttttcagcatcttcacgtgtgtacttgtgatttgatgttgttttaaaagatatcaagtctttattagttttaattctcatgtttatagatgctttccaatattattattattattattattattatattatgaaagtggaaactatccttccatgctaagtttactctacaaaggtttaaaaagtaaaagtactgggaataaactatcagagattagaaaaaaatagattaaataaaaaaaatcaatcaaaatcgaaaataaaccgttatccagataaaaatagttttattatcaatggatccaatttttttttgaggggaggaccttttctatttaaactaattctcagggctcttagttccaatcgtgaatttaattaactgtggtgttttccccttttcggccgcacgaaccagagcggcagttactttaccgcttgcttatctttctacttaatctactgaagaccccctggcaacgactttatcatcttcaaatccattacttcgttcaagcacaaatgatgtatactgtatagaatcatgttgaaattagtgtttaattaattgtgtatgcgtatggctataatcaataggtatattgaatagaaggccgtagcaatggctgtactcaacaataaagattttgactcatttaaaaaaaatgattttataatcaattattgtggcatttatcacaataaaaatagcttttctaaaaaagatgactcagaagaaaaattttggtcatattttattgatatcttttgacatcggcacatcggtaattttgaaaatatttgattcaaagtatattaatctattacatgacgacttaagatcactatatatactaaaaataatctttacaaaatatctaactattcaaaaatccttttcctcaattccagacttttcacacatactacggaaaataccctctttgttcttccataatgctttaggagtgtcaaattctgcacattcccctctatccattaccaaaatacgatcataattcaaaatagttctcaaacgatgtgcaatacataaaattgtacaatctttgaacccttgtgcaattgtattttgaattctagcatcagtttcgtaatcaacactacttgtagcttcatcaagaattaagatcttactcttacgaatcaatgcacgacataaggcgataacttgtctttcaccaagcgaataatttgtaccatcttcttcaacaattgaatctaacgagaacttttcactattttcagtaccacaagctaaatcaagagcattttgtaaaacatattcatcagtttcttcaaatggatctaaattggaacgaattgtacctttgaataacactggatcttgtggaatgattgctaatttggatcttaatttaaataaaccaatttcactgatattgacaccatcaatggtcatttcaccacactcaatctcactcaatctatacaatgcagtcataattgttgatttaccagcaccagttctaccacagataccaatcttttcattaggtttgatatccagattcatattcttcaaaacaaatggcaattctggtctatatttcaatgaaacatctttaaattggattccaccatgctcaggccacgatggaggtaatgtttgatcaatatctttttcataaggagcttcttgtggtaattcagttgcatattcgcaaactctttcaattgaagaagaatattgttcaacttgacccaaagatttggaaaatgtgattagttgtaaactaaattgaacaatgtaggaaataagtaaacccgaagaagcagcagaaattggataagctctagaagcacttaacataccaacaatcaagttaacactaaatgatgcaatatgcaattttgtagcaaaccaacgttgaactccaatggtataataataagcttcattcatagtattaatcagtcttgtatttttatcaataaatctttgatctgaagcgtataacttgattgttgacattccttgtaatacctcatcaagcgaagaaaaaacaagtgatctagatgtaccttcaattcttttaacttctctagcagtagattgataataattaaaacaacaagtaacataaataactaaaaatgggataccaatagtaaaccacggcaaaaaaatacaacacattataataacaccaaaaatattaccaaatccatacaaacataatctagcctgttcagcaatctcattatctaaaacatctgtatccttggtgaatctattgatgattctacccattggtgttgtatcaaaaaatgccattggtgcatgcaaaatattattaacagccttaatatttaataatctagatgatctgttagtaataaaaattatagtacaaaattgccaaatagatgttataacctccaaaattgtaaacataacgtatattccaatataaaaaccatctgaacgatcaacaaatttacgagtagaccaaaatgataaccaaacattaacaaaaatcaaacaaaaggttgcaattatcaaagaataggaggaaatttggcaacataaatttcaacccaagggaaccacacccagatcttaaatatgtaatcatcacattcaaaggaatgccatttgttttagaagcttctgcaattattaactttcccttttgctcatcaaccattgttgtttgttttctaataagtttcaactcttcttctttgatctcttcatcttcatcttcgtcattagcttcatcttccttttcatctatcaccttccatttggaaatccatcaagttctggaatccaggattacgtgcaataagttcttcgttagtaccaatatcaatagttccatccccattcatataaataattctgtcagcatctccgatcaaagacaattgatgagttgctaagactctagttttgttacccaaaagacctaaaatacattcactcatgatatgcttaccaactttggcatcaacggcactcaaaacatcatcaaacataacaatattgtattcatccatagtgtaagcacgatagacagttctagctaaattgatacgagccttttggccaccactcaagttgacaccacgttcaccgatttcagtcatatcaccagcaggcaagatttcaaaatcactggttaatgaacatgactcgacaactgttttgtaaatttgcttatcataatccaaaccaaaggtgatattttctctaacagttgtattttggatccacggattagaacataagataagatcaccataaatatcaacattaccatccagcctaggcatatcaccattgattgcagctaaaagtgaagacttgccagacccaatcgaaccagtgatgacaaggaattcaccttgattaatgtttaagttaatatttgataaatgataatcagaaccattcaaagaacaagatgaagaggacgataataaactatctgatttgattttttcagttggaatgctaataatttctttaggagactcagctgaccaattgaacagaccatttctaatagaaattgtagttttgctagattcttgtggatatttgttataatttggatcttttttagtttcagttgctagaagaaaattctgaactcttgagaatgcaatccaagcatcactcgctgatgttaaagcggtaggtaacattgatacatgtccagttaaaatgttgaaaagagtcacagatgaaaagattttagctgcattttttaaacctcctagttgtccatacattgctaaaaatccaattaatgcagatacggttggtaatgttactgcaataccagtaataagatttctgaatacttgatttttcaacatgatttccatctcttgacttcttaattttgaaattatctttgcaaacggtttttcccatgcataatatttaatcattttaatattatgcaaaacttctttaatacttttaactcttgcatcagtttgaatattaatagactttctccatttcataagaaatttcatcgagtagacaataaaaccagttatcaacataaaccatgcaataccagaaagagaagcaccacctaaattaactgccaataatgcaatagtaatacctaaaccgattggcaaacacacaatgactgggaaaaagtttgctgctaaatcaattttagatagatcattacctaaatatgctgtaacagttgagggtggatatttgattcttgattcacgatccaatctaaaagacttatccaatagaacttttgtcaaaacacctttaatttctgcacctgcaaatgaaacatcattgaaatttctagcatataagagccctgtagcaagaacagttattgcaacacctaatgctaatccatatccacttttaccaacatcacgaccttctgccttattatgaacataatcaatcaaagctctaatttgtaaagaattcaatgctgtaccagcatctgcaacacctttgaaaatgagtgcccaagtgatatcgaagaaaaaagttttgtatagtgctcttacaattaacagttttggatactcaaatttgtcatctgtcaataaattttcacgattctctggtgtatctttgattttattacgcttcatgtattttgtttcatatttatatttgagatcattgaaatgtgataaaaataagttacattgcttttcaacgtcataactagatcccttaggaattttgtataaatcttgaggttggatagttcttcggtatccaatataaagaattggtttacaccaaaggaaaaaagtttcactgtaaagattggtctttctgaatgggaattcaattctttcatcttctgttaaaactggaggaatacgtttatcaagcaacacttttgtcattaaccgtttttgcggttgaataaggggatcattggcatttcttttctctatgtcttcagtttcataagacggatatttggcattccccgtaaataaagttgtaggtatcatttggtagctttaactttcggtgaagtatataccaaactatagctttttttaaacaatttgaaaaagtaacagatacttaatgtattatttttcattcaattaaatttttcaatgaccaacattgtagttttgcaagttcaatctaagattcactatcaataatgtttatcaattgaagatacactgccttgcttatttggtgaaaaggcgatttgctaaagaattactagtaagggaaattggttgagaaaatatttgatatgaaattggtgtggcaactgtggattcttttgaggaggaccacaccatgagaatataaaatctccatgatatccatcttttatcaaacttacggaaaacttacttagttctttttaaattatacttttatttatatagtgtatacacctatattctataaaagcaatgatactacaagggaaatacaatttttttttgattattcgaaatccttttcttcaattccagacttttcacacatactacggaaaataccctctttgttcttccataatgccttaggagtgtcaaattctgcacactcccctctatccattaccaaaatacgatcataattcaaaatagttctcaaacgatgtgcaatacataaaattgtacaatctttgaaaccttgtgcaattgtattttgaattctagcatcagtttcgtaatcaacactacttgtagcttcatcaagaattaagatcttactcttacgaatcagtgcacgacacaaggcaataacttgtctttcaccaagtgaataatttgtaccatcttcttcaacaattgaatctaacgagaacttctcactgttttcagtaccacaagctaaatcaagagcattttgtaaaacatattcatcagtttcttcaaatggatctaaattggaacgaattgtacctttaaataacactggatcttgtggaatgattgctaatttggatcttaatttaaataaaccaatttcactgatattgacaccatcaatggtcatttcaccacactcaatctcactcaatctatacaatgcagtcataattgttgatttaccagcaccagttctaccacagataccaatcttttcattaggtttgatatccagattcatattcttcaaaacaaatggcaattctggtctatatttcaatgaaacatctttaaattggattttaccatgctcaggccacgatggaggtaatgtttgatcaatatctttttcataaggggcttcttgtggtaattcagttgcatattcacaaattctttcaatcgatgaagaatattgttcaacttgacctaaagatttggaaaatgaaattaattgcatactcaattgaacaatataagaaatgagtaaaccagatgatgcagctgaaattggataagctctagaagcacttaacataccaacaattaaattaacacttgcagacacaccatgtaatgccatagcaaaccaacgttgaactccaatggtataaaaatatgcttcattcatagtgttaatcagtcttgtatttttattaatgaatctttcatctgatgaatataatttgatagttgcaagaccttgtaagacttcatcaaatgaagaaaagacaagtgatctagatgtactttcaattctcttgacttctcttgcagttgattgataatagttaaaacagcatgtaacatagacaccaaggattggaacagcaattgtaaaccatggtaagaaaatacaacacattataataataccacacatattaccaaaaccaaaacaacacaatcttgtctgctcagctatttcattatctaaaacatctgtatcttttgtgaatctattgatgattctacccattggtgttgtatcaaagaatgccattggtgcatgcataatattattaacagcttttatattcaacatagtggaggatctattggtaataaaaataatggtacagaattgccaaattgcacataaaacaaacaaaatagtgatcataacatatataccaatatagaaaccatcagaacgatctgtaaatctatcacttgaccagaatgataaccaaacattagtaaacaacatacagaatgctgtaaaagtaattgacagtattaaatttggcaacatgaactttaatccaactttaccacaaccagaccttaaataagtgaccataacattcaatggaataccatttgttttagaaacttcagtggtaattaacctacctttttcttgatcaactacagtggtttgttttctaattaatttcaattcttcagctttggcatcttcatcttcatcctcatctttatcatcagcttcatcttccttttcatcttcaccttccatttggaagtccatcaagttattggaatccaggattacgtgcaataagctcttcattagtaccaatatcaatagttccatcaccattcatataaataattctgtcagcatctccaattaaggataattggtgtgttgctaggacccttgttttgttacccaatagacctaaaatacattcactcatgatatgcttaccaactttggcatcaacggcactcaaaacatcatcaaacataacaatattgtattcatccatagtgtaagcacgatagacagttctagctaaattgatacgagccttttgaccaccacttaagttgacaccacgttcaccaatttcagtcatatcaccatgcaggcaagatttcgaaatcactagttaatgaacatgactcgataactgttttgtaaatttgcttatcataatccaaaccaaaggtgatattttctctaacagttgtattttggatccatggattaggaacataagataaggtcaccataaatatcaacattaccatccaacctaggcatatcaccattgattgcagctaaaagtgaagacttaccagacccaattgaaccagtgatgacaaggaattcaccttgagtaatgttcaagttaatatttgataaatcattgccagtaatagttaaagaatcagaggatagtttattttcagttgattcatctgttgaaatggatggtgtataattttcaggaatctgataaccaatcaaatataccatttttgatagaaattgcagttttgctaggactcttgtggatatttgttataatttggatcttttttagtttcagttgctaaaaggaaattttgaactcttgaaaaagcaatccaagcatcactggcagacgttaatgcagttggcaacatcgcaacatgagcagttaatatattgaaaagggtaacagaagagaaaatcttagatgcatttttcaaaccaccaaattgaccgtacattgataaaaatccaattaatgcagaaacagttggtaatgtgactgcgataccagtgataaaatttctaaagacttgattcttcaacatgattgccatttctttatttctaagctttgatatcaatttagtgaatggtttttcccatgcataatacttaatcattttgatattgtttaagacttctttaatacatttgactcttgcatcagtttcaacagttaatagattttctccatctcatcaaaaatttagtagaaaagacaatacaaattgtgattaaaataaaccaagcaacaccagaaagtgaagcaccacctaaattaactgccaataatgcaatagtaatacctaaaccaattggtaaacaaatgacaaaggggaagaaatttgttgctaaatcaatctttgataaatcattacccaaatatgcggtgatagtagatggagggaatttggctcttgaatctctatctaatctaaatgatttatccaataaaactttagtcaaaacacctttaatttcagcaccagtaaatgaagcatcattgaaatttcttgcatataaaataccaaagaagaaaacaatacacgagataccaacggctaaaccataacctttcttaccaacatcctgcccttctgcctttcgatgaacataattaattaaagctttaatttgtaaagagtttaacgctgcaccaacatctgcaacagccttacaaagaactgcaaaagtataattgtaaaagtaagttttgtacaatgctaacagaactaagttgcttggatatttgaagttttcatctgttaataaaccttcacgattttctggagtatcctctatattatgctttttcatgtattttgattcacaattacttttaagttgatggaaatgagctaagaaaatatctgaatttttttcaacatcaaaatcagaacctttggaaattttatataaatcttgaggttgaacagttcttctataaccagtttcaagaagaggaacacaccaagtgaagaaagtttcactgaaaatattcgttttacgaaatgggaattcgattctttcttcatctgttggaattggaggaattcttttatctaacaacaatctagtcattaatctattttgcggttgaattagaggatcatcagcatttctcttttcaatatcctccgtttcagtaatgaagagattttactctcttatttgaaaatagagtttttaaaaccattataatattagtatagtaatgtttgagtataatgatagttttcaaatgaagagttgaacttttgtttgagttctagcttatttactatacaagtcaagtcctggtatttagttttacagaaaggacagaggtcaaacaccaaaagaacaagcaagaaaggagaaagaatgatgcaagggacaccaaaaagaaatatttgttagtgattacgttatatcaataggtcgtttaagtggaaaattttcagttgcggaagcgtatcgacccgcttttctttgaaagataagaaaaaaaatttatttgaccgcaattttaagggtcctttctttccaccgtggcacatgcgtgtcagtttggagtggtaattcccgcgtgtagagaagttaagactgttcattaatcttattatggaaagtaattgtagttataaaagatgtataaaatagttaagaaagaaatgtggaaaataacccatataataacgcagtctgtaatattaatgataatcaccgttgtaagagacggagtgcagcaccgattagccatgtaaattaagatactcggtagtgttgatttaagtgtctgcggtggtggtgactccagctgtggaaaatgtgcaattaattgtggattattaccgtacataaattcaccaattggcggtggtggcggtggtgcagtagatgctggtacattaattgaaaatgaaactggccgttgtattgatttatttctttttggaacacatctatgtttaattaaactttgtgacttgacacgttttttggggatagagagtttccgtattgctctctgtggcgttttaggattatatgctgtaagttgtgaatgttgtttggctactgccattgtgctctgatagtgacaaaaatctgtttcttttgtatcgaataataaaaatactactcatcatttttttagtgttttcccttttgccttttatagtaaattcttcaaagtaaaatgtgatgtgtcacataaatgtagttaatgacgaaatgatgttactatcatccaaaattgctacctatcgcaaagtacatataatacttcctaattgggaaaagtgtcaaatgcgacttgtcgaccccacatttttcactttaagaatttctttgggatttggaaaatctcgcaaattgtcaacatgaattttaataaagtcagaggtaaccacaattttaatttttaccccgatcttttaagtttgataaatttgaagtgaatccttttaaaggtgaatttataacaggtgccgttaggtatgtcacagtctgaaagcatggatacagagcttaatagttcccaaacttacaatatgagctcagctaatagttctggaaggaatcaatcagtagagctggataacaatgatgtcacaacagaaaataataataaagacgtgaaaagggaaacaccaaatcaatttcaggatgaaaaactacctaaaaaaagaaaaaaagtttcaatggcatgtatttactgtcgtagatcacatatgaattgtgatgaatcaagaccttgtaaaagatgtattaaaagaaatattggtcatttatgtcatgatactacaaagcaaaaaccttcatcaccattagctgatgcacctatcaattctaatacatcaacaagtgttttaaatacagttttatctcctcaaacgattaaaactccaaaccctatagaccttatccatgacaataattttaataataatattggaaacaaaataataatgtattacaatcatctgtaacaataaatcaattaccgtttttttactcagaacatgcaggcttcagaatttaattctttaactgaattcttatcaatgatcgatgataatgatatgatggattccataaacctttccaatgacccattgttacaaaaacttgaagctacaaattatatcagctcaagtaataatttagctgcaatgaacaatgctcccgttacctaatgcagatcaaaacttatccaaaatgagtcatcaacaattaaatgtattacagcttcaactgaatcaacaacaaaaagctttacaacagcattatcaacaaaatggaattgttgatccacaacaccgaatagagtctaatcaattaatgaataacgatacacatatacatgataatacacaatctttcacaaaccaattatccaattctttattagaaccatctaatcaaataattacctcctataaaacaccaaatcaacagaatgctcaactgagttaccaaaaatcaccagctttgacacgaaataacccaaatgtatcatcaatgccacatatctcaggatgctgcaagggataaattctttttaacagctgctgatcctacaactgagatttcaccggaagaaagattaaaacaagttattaatgcaaaacttgaggcaggtttattacaaccttataattatgcaaaaggttatcaacgtttacaaacatatatggacaattatatgtcatcatcatcaagaagtagaattttaaaaccattatctacttttagaccaggatttcgtgcaattgctaaaactttaaaagacattgatttaattttagttgaagaaagttttgaaagaatgctattggattatgatagagtttttacatcgatggcaattcctgcatgtttgtggagacgtacaggtgaaatttatagaggtaacaaagaatttgcatctctagttaatgtatctattgaagatctaaaaaatggtaagttaacaatttatgaattaatgaccgaagaaagtagtgttaacttctgggaaaaatatggggctattgcatttgataaaactcagaaagcagttttaacaagttgtaatctacgtacaaaagatggaagaaagaagaaaaattgttgttttagttttacaattagaagggatagatacaatattccaagttgtattgttggtaattttattccaattagataatttcttattgatctttctttatgtattattgaatattattatttaatgaatctattcgtctattattctttcgaatttatttcttcaattagatcaaaaatctgacatttatcattatctttgaaaaatctcttagtcaacccataagtaacatcactgacattaatgaatttaaacttttcagtttcctttatggtattctcattacttgtgattatgctttcaagacatttagtaaattcaacaggtgaacttgttccattaataaagttatcaacaactctctgcgcattcttagcaacaataagtccattataattacaaatgattggtacactcaatgtatctgattttaatttgaaatatccacgcaattcatcttttatatcattaaaaattggattatgtgctggtatttctgtttgtaaccatttctttctaattttacttctccatacttttgcattcgtcaatcttttttgaattatatcaagtttattaagtttttccattaattctcccttttctccactaacaactatttgttcatatccatttatattagcaatatttaatttacaatcctctttacagacttttaaaatactcaaaaaatctctttctctaaacattaaagcaaccataccccacttcttatctcgattttcaggtgattgtagtactttctccattaacaatccacgattgtatgcaatgtttaatccgtcctctaatgaaataacatcttgaacaacaagagcggataattcaccaagtgagtgtcctagcaagtaattagcatttcttatatcccaaccggttgtgtttttgtatattgtgtagtttaaataagttgcaagtaaaactaacggttgaacaaaagaagtatttgatagttcttgactttgaatttcttttgaaggaaactgatgatctgctaaaatatttagcaattggtacatttggcactatatgttgtgcatgattaatcaaatcagtataatgtctatttcttacatcgtcaacttgatgatgagttaaactgaaaatttcaggtgtaacatttccctgcccaggaaataatgcagtcgtaatattcaatcgacttgaggttgtatgtaaaaatctacgctgtagcattattgtcgtcaaatcttaaatattatataatggatatatcttttctataaaaaggttactcaaaggtctgatccaaagtcttgttccccagtcaatgttagggatgtagacgtttttttggtctcacagaggagagtctcaaaccaccagccacgtgactcggcggctcgtcatctattccaacttaacagttaacatcaacatgcatttgcttgtagacaacaatttctttacccttaatctcagataactgagcccaaataatcacagcggtgagttgtttgccatatacacatccagaatccaacccgttggaaaattctttagttacaactcctcgtttagcatcatgtccgtaaaagattttagtacctaatgtaaggtcagtatcttttagtgaatctacatccttttcatagatttcaagttgcttctcattccaaattttagtccatgcaactgatttaacaccaccaactttatcttttctatcatctgttggaatttcccaattaggaggtaataaatttctcattgtagttacctcttcgatatcttgatgatgtatacctttactccaaacaagaccggcatgaactgcaattccatctgcttgatatttagcgtgtttgttttgtttaccattagtgtaatgtggaacgggtcctaattttttaattggagaacatttacttagaaagttaatatgttctggagttatttttttagcaagtttcattaactcatctaaatcataagcttctttcattcttaatgtagaattgacattagtttcatgatttataaaagttggaggtttcaccccgtggaattgagaatatcttttcatcatagctaattcatggttacctaaaatacaatcaagattatgttcaattgcataattaataacctctatagaatcaggtcccttgtttgtaaaatcacctaatagaataacatgatcatccttaccattatcatattcaactcttgttaataatttttttaattgcttcaaagatccatgaacatcacctattaatatcattcttttagcacgtcttttagaatctaagttaccaccatgtttctcttcatattgtgataatttgttaagatgtttctttacagtggaagaaagagatgttgatgcatattcaagtgatttgaagtttggtattatctcgactggatcatcaggatctggttgtttacctttgactttttctggtattattggatgtaagtaagtttttgaacttttaaccatttttatatcaggaatttgaacaccttctggagctaaattcggtaaaatgattatcataatgtaaacgaaaacacataatgtaattacaataataagttttaccagtttgctatctcttatgtaagctgggattaaactatcactctgtgtgtctagatatatgtactcttcatcatttgcagacattgttgatttgttggaaagagtaagaagatatatattggcactgtgaaaatttaagaataataaatttatcaaaaagaagtaaattataataattttcaatgatttctctaatttgattcttttatttgataataacaatctcgataaaaataaaccctaatggtcgataatgaacccaattacactaagaaatgaatctacgttgtcttaataaattttcaacttgttcagattatagattacttaccacgtggtaatgtgcgatattaaagtaagttaaacagttattgataacttcgatactaggtatacaatgttgcttcttagattaagtatattattgtgttgtaattataaatattgtatttacatgggagtatattatttgatatttgatatgcaatctctctttatttcttagattctgcaatttcttcatctgtggaaaaaatatcactctttccactaagaatatcatcaagagatgatgttatttgttttgtttcttcatcttctggtaatgcctttaatgccttttcagcttcatcaccacctaaaaattttttcatacggaaagtaaattctcttaatgatgaaatatcgtaataccaaaatgcacctgcaccaaccataccaaaagttgaagttgcaagtagtgtagcatgcgttacagcagccatagcatctctatagaagttgaactttggtggtacatgattatgttgataaaatgttgggttataacgacgtgaaataactcctctatatgcaatttttgatgcaatgtatgttaaaagagtgaaaccgtaaaatgttgccatttgataaaatctacgttcattatacttaagaactgcatcattcttagttgatgcatcacctctccctaatagcttaccaaagtcaaaactcattttgctgaatgtatgctttcctttgtgttgtgacatgaaatgaatgcactgaccatgggtcctttaacttacagtggtgaaatttgtgcaccaaaaattattacgtaagaaagtatggattattgagagtaactggttttgtgatgcttgaacgattagcattatattctacattataaatcatagtaactatgaaatctaatcgttaaatgactaatatcaaaagtaaattcaataaacaattttaaaaagaccataatgtaagaatcattaccataaaaaattaccatttcctgaattaaacgtctcttaactagtgatcaaatcttcactggtataaatcatttaccatcccaagtttcaagttcaatcccattatccttatatttttccattaatttctgtagtatcagaattgacaggttttgataaatctgtgtatactacagttttgaaaaccacattgtttcgaatcaacactggaatggaagacacaaaaatcaagtgcaagaccaacaactattactttagaaatattgtgttctcttaagaaactttcacattcagtatcacctttatcccatatatctcggaaacaagaataactctcctttcctgtttccgtccctttatggaccatcaacgtaggtgttccattctcttttgcatctgtgattgcatcttctaaatcttttggatatttggcaccttctgaattttgaatacaatgtactggccataaggtctgtgttttaatttcatctgtcccatagggagatttaacatcaatcgtagtgtataaatcatctttactttgagcaaatgagatatgactttgaggatgccaatcttttgtagcaattaattgcatcccatttccttgatttaagtaaattgattatagggtttatgaggtctctgccacccgcaactgctaatgaaccatcaggtggcaagaagtcctcttgcatatcaattatcaacaaagctgtagccatgattgtttacttaacttgatttatgtaaaagaaaatcatatcgactattagagtgaattgcttatttttcgttataataaattttaatgtttagaatgcattattaagtgaacaaacggagagtttatttttcctccctcaatatatgctaatttatagtcaacaacactgctgtatcattataatagttacttccatatactcaaccccatttcttcctcataacactaccaatgatatacaatgcccttacacaccctggccatatagtaacgacatgaattcttcacaaagctgagcctccacactattataatttccattaattacccaattgggaaatgattgactttttaacatggctattataagtcagagttagggatgagccgccatcaacaggggctccttttcattagcattacacatcacaatttcaatgtagattgacaagggaaacattgggggtctttttcttaaatttgtattaacagtgaagggaatttagacatgcccgtttcagtgtctttagatgatatacttgtcaaattttccaggcatgatggtagtaaagatgatgaaaattcaacggattcattttggactgggttacaggaacaattgaaaggtttggtcgatacatatgatgaaaatatgcatgagaaagtgaaagaacttctttctagagatgacaaggatactaagtatgtcaataacgatgctaaagatgatgatgaagatcatgaatctatcagagatgataataaacttgaactcattacagttctttcaattataaaaactgttcaaatgattaacgcttttttgggtgatttaccattaactacagatatttcacgtaaaattaacattttacttttgtcactggtttcaatgtttaaataccattttcaactcccagtgacacataataattatgcatttaaaaattttggtaagttactaacctcagaatctacaaacattgtaactccattcattaaatttatgaatgaatcaatgtctactaatatggaacacaataaatcagaaactttagaaaaatcgtttacattattatttgttttacactcttataataaagatttatttgcatttctatttgactctttgaataattcgaatatggcaaatgatattttttattcatttgatttaaaatctaaaacttcaatggcaccattgtctgcttcatcatctgctttttcatcttcatttacatctctttcaaacacattatgcactgacattccatcaatttcatcagtcatgcacagatttaaaatgctgatattattagaggaatctacattagtttctgacactaagtcaactaacttgataaacattttgttcttttcatcttatcataaattattattaattgatttaatttcaaattttattaaactgaatgaacttttcaaaaatggtattacttttaataatcttttcgattatacaactaacattatttcaaattcaaaatcaatcgattatctttcaatatatttatgtcataatgtagaagcttttgataaattggatgattttgctaaatcagaaaatccatctcattcaaatataagagacgtttcaatgtttttgcttttgaaaagtttcatctaatattttaatgaattataatattcttcctacaccagagaatcaattattatcctttataaatgaatacaacaatcagaattatttatcaattttaggtatttcagaatcaaataatgtgtctgaattgaacttagcaactttgattccaatatttgagttttagtgaccaaaatttcaaattagattatttcaaagagagggaatttcttggcaactttgaagcttgcattaatcaacttagatttgaatatggattctgatgatgattttatgaatttgaatagtttattaattgatattggatgttctatttccttacatgcgttggttgataaaatacaaactttacttgttataattattaataaaatcaaattcaattcagaaattgacgtttttaacaaaattccttctgattatgaagataatttaggttttaattctattcccccagtttacagatctgatatgtcatttgaaaataatattgtattacagtcagattcctttggagaattctacaatatattaatggaaatcgaaaatcattcgtcaattattagttcagactcagtcaatttattggaatcatcattggttttgctactatcaattaaatcaaaggtttataaatttatgaaaaatctcaatattgaaacaaatgtcttaagattaccagatctttttacaaccaatgtggaatccaacaatagtgaagaatattctttaaacttcctttaaacaaggtattgctaccaaaataagtagtttcaaatctgcaaaatctttaaattataaacttcttaatgcatctattattctaaacatcaattctaatttaagtcttttgatattaagtgaaaactacaaatatttgaaatcaaattctttatatattgataattcattatctagatttctaagtgaatttacatttgatttctcactaacatttctagtcatttatcaagaatttggcctactaaattttttcaagtccataagaactatgaactatcaaaatttaaaatgattttaccaacttcaatattaattttcaaactatttcaaacaaaaaccgtggattcaccaacattatcatcatcttcgtcatcatcaccaatagctacaccatctaataataaaagtttcaactcaatctcaagctatgcaaacaactcaaggatttgctattcactcaagtaatttagacttaattactgagattctttgtaagagtgttattgcaagtaacttgcttagacaatatgttgaactgtttgatgatggtcagtcaaaaccatttaaaattttacataaatttttaaaatcacatcccatctactttaaaaccatctaaaatatccaagggaacctgttgttttagatgttgattattatacagaggcacttttattatgacaatgatttttcataacctatttttcattaagtatttcctttttttataataataatttcaatagtaaaacaaaaacgtaatagaagtgtgaaacttttgcatgcaatccacaactttcccacaagttttcatacagttatatcgacaaaactaaaattaggaattagaaattatataaaaagaattaaatatgggaattatgcaaaccatttagaaatgattgccttggtttcattactataaccactaatcatagccatactttgttcttgtggtaaagaagcctaataaagtcttaacagcatttgaagcatttgaatgcagtgtcatcagagatagaagcaaaaattaatgcttgaatgacactatcaacaacaacggatatcttggcattaataacaggatgttgttgatgaattaattagtcaaaaatgtataagcagattcctgcagcttcaacattttgacaaactggtaataaacttatccatgtatttattaattcattaagattattaatttgattaccataacattgaattaaaatagcaattgtagagcacatatactcaggttgcatctatattatctggtgctctcgcatctggtatagttgacatttgtgttattgatggaatacacgctaaacagaatgatgcatattctgctgcacttggtgactgtgcacataatccaacacacttagcagcagcttcacgaaccttagagtctgactgatgttaaggattctccaactgcattgaagaataagtcgtgaagtttgaatgattcagtttcaccatgtttaactaagtcacaaatggcagtaataccaactcttcgtaatattggattttcttctttgaggaatttatctattataggagctaatttcataaacgcaggaatgaatcttggaccacaattttggaaaatagatgaaatacctttacttacttcttctaataaatcatcatcagaacaatcatcatcataatcggagacttcttcattataatcatcatcaccatcttcatgtgctgaaattctatcataaatttcagataaatttgtgttaattgcatctgcaatattagataattgggtatcatctaatgattgtggtcccataagttctaaacctttagatactgcataataatatgcgaaatataattcaattgcaggatctgtgtttaattgtgtagctaatttattcaaacatactcttccacagtgcaaatacttcgttactttgtgaggaaccagtagaatcaatatatgattttaataatgatggcattgtaactgcacaagtacctctgacaccatcatgtaagtagaaatctagacctggaataacgatctcattagcaatttctggaatataaggagcaaactgaatcatctaaaacatcagagtataacttcaatatttcgattgctgcagctttatcatctaaaacaggatgtatgaacagcaatatgtttaccagatagttgaatgacttcgtagtcttcattttgattaatttcatctaattgatcttcatcaacaatagatatatcttgagttgccttagcttgttcaagtaatggaggtaaaacaccaggaaggaatggtaagaatgctttaccaattaatttacaaactctactccaacctttttcaagatatgatttgactgtatcatcatcaccttgtaaattattttgtaaatatgtgaaaatttccaaaacttcattagcagattcacctgaacttttccttaccaacagcagttgcaattaaagtagcacattcaatagatttagcaattaagtggtctatttgttttatcaatatcagatttcataacagataataataatggcattaaagtatcataatacttaataaatttattttcagcagcatcagcaacaacagcaattagttgttataacttgttcttgaacatatctctttggagatgatttgagtaagtttaataaattgtttaataaatcatcaaggtatggttcaacaatatcctttgttgcctcttcacaaaaattaactaaagcagcagctgcatgatgtttgaacacgtggaacattattaacagataacattgaaataagtgcaggtaaaattctatttcctgaagttctttgaatgagacttgcaaaatcagttgacatttgacctaatgcattacaacaagcgaattgaactcttggttgactgtcgtttaatgaaggaataatcatatctaataattttgaaatttcagaacttaaaacatcagcacaaccttcacttgcggatgataatgccatcaatgcagcttgtctttcagtgccaatcttgtgattgtaacatatgaggtaagtattcaaataatggacctgctaaacattgaccatttaattttaatgcagctctatcaagtgcttgtcttgcagcattatattcttcttcatcaccttcatcatttggatcatcgatattattccattcagaacaatcatcatcatcaatacaaacttcaggtcattaatttaagtgtaactataactatagttgaagaatatgatggttctcttttacacatatttggagatgattcacaaaaagttgttaataattctaaagcagttaatcttgcatttgacttctaaatctttattttgagcaacttgtgaacaaaagctaataattgtttcaaacattggtttgaaaatttttggagctaaaaccgctaaatcaatcaaactctctaaaacggatgctaatgcagtatcattaccactttgataataatttaggtaacaagttcaataaatttggtaataattgtgatagtacggaccaagttgattttggtaagttttcaaagaaggcaataaatgcagtacaagttgcaattccaacatcatcggaaggatcttcaaaaccagaatggaacattttcaagaaagattcattaagatcatgatcactaataatttgtggagttgttgcaattattctgaatgatgattccttaattgcagtatctgaacttgaagtagcttgcataatagttggtaataaatcaggccattcaaatttatcttttgcaacttcagcaattgcatctgctattttatgcctaacatttctagtttgttgatttgtaaaaccttgtaatagaatcctacgaatttcagtttttgcagcaggtgaaatttgatcaatttgtctatcagtaagtgaaaattcttgataattaggagatttaattgcaaaacgtctaaacaagacagctgcaaaagctcttgtattttcaagcattaccatttgatgcttgttcagcaaggaaaactaataaaatatcaatcttttcctttgtacaccaatcattacttaaagctgattctgcttccttacgataagtattatcatttgaggaaagagcagaaagcaaatttcccaatatttcttgtatgtcttgaggtatattagacattgtctgtataacaattgcttctagtaagcttcagtaattatccaaaaaaattcaaaacctaacttctaattaaaatcacccttttattacgtgaaatttttaaatttaaattgaaagctactcgtcattaaaacatgtcgtcctttgaaaaaaaaattaatgaatttattacctaaacacaaggtgcactgattaaatttttttcaaaatttttttttttttttttggcccaaaaatatttttttttttcacttgaaggtttaatactactgatagtgaaatttcaagatcattttagcagaagaaacactggagatttattgttttattaatatacaattgcaaaattaaacacatatattgaatagaatatgggacttgctggaacgagaacaaaacaaagatttggattggatcctagaaataccaattggtccaataataccgaaagattcggacatcaacatttagtgaaattaggatggaatccaggtagtggattaggtttatctaataattcaataacatcacatataaagattacagttaaaaatgataatcttggtttaggagctaatttagctaaaagaaaaataaaactgatgaattcgatagtggagaaaatgttcatttagatgcatttcaacgtttattaggtaaattaaatggtaaagaagaagaaattaataaagaagttgatagaaagagaactgaaagaattataaatggtcgttggggtgttcattttgtgaagggaagtacattatcaagtacttgggataaagcaaataaacaattgaaaactactgatgttaatgataagaagagacagagagatgatggaaatgatgatggatctgaaataaaacctgaatctaaaaaatctaaaaaggataaaaaggataaaaaggataaaaaggataagaaggatagaaagagaagaaagtagaaaaaagagaaaaagagaaaaagaaaagaaggaaaagaaagagaagaagataaagaaagataaaaaggaaaagaaatcaaagatagagaagaaagagaaaaggtcctaaaaaagataaaaaggataaaaaatctaaacttgactgttaccagagaatcaatgctgaaaccaaaggaagaattatcaacagcaaatgttactggaagtaagatggcactgcgtggtaaatggattagacaaaaacgagctgctgtcatggatgaaaaagctttacaagagattttcatgattaaatagttattctgctttgtataatatatataatagttaaattttatagaggtttctattttttcagattaatcagtttacttggaaattcaaaagaatatagttcttttaagaaagaaatgaatatacaaaaacttaaacataaaagaaaagaaaatggtggaatatatagttgtttatttataaacatattgatggaaatgaaagtttagaaaatgaaacgatagtatatatggttgataattttttaaactattttagtatttatcacaaagattataataaaatcattgaaatagtacctacagcgactgaaccaaccaatgtaaataagtagagggaagaaacaccaatggaatgtaatggagattcaattctggaagcagcaccccttgatgtggaactaatacttgaaactgaagatgcttgtgacgaagaactatcagttgtccttgaagaatcagaactgtttttagtactagtcccagaagaaccttgggagaaagtttgacttgcagaagcagccttaagaacagaagtacaacttgattcagcagatgccttaacgattgtagcagaaccatcaaaatcacaagctgatgtattttcattttgatcttcgtaatatttgtttaaaacataagctaacttttcctttggagaacagaatgagaagacaccatatttaccagatttaccatcagcattaatttcatcacatgaagtgtaatcacaaacaataccaaataattctccgtaatctttttcatcaacatcatctgagactgtacattgaacagatttagcaatacactgacaaacattatcttgaggagttggaggtaaaccggtagctgctttccaatcagagttagttgcaggacatttcagttcatgagcacttgcagaagcagctgaagcggtagcagaatgttggactgaatgagagccatttcagatcttcaagtagttgaaatctgataatgtggaaacttcattatcatcaagagaaactaatccataattgttttcttcttcaaaatacatgtaaacaataccaccagaccaaacatctgtcatttcatcagagaaagatagctccgacttcagtaaatctgtcttggttgaacttcattacaaccatattcagagaaaaagactgggacagttaagttggcaaattcggcagttctagtctgcataaccagacttcttgaaatgtagattgaccacaccattcgtacatattaataccgtagaaatcagccttgatatcattatcaccacaagaaaagtaatctgctgatggaactctagtatcagcatcagtcattagcagaagtaaccaactgggatatctctataacctttttcagaaatagtaagatttcatatctctaattgcagctttgacgaaaggagcagaatcagtgtttgaactatttgtaatgacttcgttacctgcgaagaaacctaaaacattatcatattgttgcatcatatcaataacatcagtatatctctcatataattcaacagtccattctggatcatcaggtaataattgattcctttggagaatgataaatcaggcaataacatagataccagcatcttgtaaagcactcatacaagcatcatgatcagctgaagcatttaatgcataaattctaagaacattagtatttaattgagttaaatatggaatatctctcttacaagaatcttcatcagctaatggatcaatataagtagcatctgaagttaaatttgcagtattttgttgatatgcaacaccacgtatataaaattgagaaccattatttgtatagaaaaatttattaccaacaacttcaatagttgggaaatcagcagcaactgcacgttgaagcaaaaagtaatgcagataatttaacgagtgtacttgcgaacttcataataatgtggttatttgaagtttgaatgtgaattacagaacttagataaatcaaatcaaaaaaagaatgaaataaagaaagatgttaatttagacaaatagcagaattgggaatcaatgtaatgatataaataattacaactaattttgcatcatgaaatagatggatgttgcaccaaagccaacacgccttacactgcaaaagggtaaaggtaaacagaaacaaggctttgccagctggtgacaccagcagaaagtctggaacagaacaagcgtgtagattagaaagtttccaaaaataaattatttttcactctaaatattatatgatgtcaacggcatcgcgtggggtaaactaattattatgataataataataataataataataataataataacactcaggttacgatggttcgtgttattataataatatcatcatgtgttgtggttccagaattccagaggggctgagtaaagtttaattgatatattgtaaatattgtaaatattgtaaaaattgtaaaaattgtaaactgtgttaaatatatatagggtgttctatatactcgaaatacataagaaaagaatgttagttatactataatgatataaaataaagatagaaaaaacaaaagataaaaaaatgaacttgattgatcttgaacattgatcattttgtatatgaacaacatcaactatttaaattctatttgatgttagacatacatccatattgatgataatggtgaaataatattctagttttcgattttaattggaaaagaagtaaaacaaagaaaataaataaataaataaatgaataatgaatgaataattgatggatgaattgaattgaagtaaagtgaagtgaaatataattgttcaacttataaatattgaagattgttaattgatttgtttgtgagagaaaaaattataatacaaaacaaatataataaaaatcaattgattttttattggtacaaagattttgataaattatttattacaatcatcaaaattataataataatgcagcaataacaccaaagaaactcatgacagatgatgcaccaacaacacctgcttcacccctactggttgatgagattgatgaaacagattgagatgcctcccttgatgaagaagtttcctttgctttagttgtggttttagattcatcagtggtcttgttagttttatcgcttgatgaaatagtcttggtttgtgtaacaccagctgcagaacctaaacctgatggacctgctgctgataaaacagatctacatgaagatgcagtacttgcatcaacaatagttgcagaaccatcgaagtcacaagcacttttgttttcattttgttcaaggtaatataagttaagaacaaatgataatttatcctttggtgaacagaaagaatatgcaccatatgtaccctttgaaccatcaccattaataccatcacaatcaattgtaccacaaatgtaactgaataaatcttcataatcatcttcatcaattatcatcagagataacacaagataatgatttttccatacattcacaagtactctcgtttggagttggtggtaacgcagtttgtgccttccagtatttgttagtagttggacatgctagaactgaacccgaagttgaaatatcagaaacttttgcagtagttggggagacattgttaatttcagatgaatagtacttataatcagccatggtagaaacagtatcgttatcaacaacagagactaaaccataatcattaacttcttggtaatacatataaacgataccaccagaccaaacatctgtcatttcatcagagaaaatagtaccaatttcagtaaattgtcttggttgaacttcattacaaccatattcagagaaaaagactgggacagttaagttggcaaattcggcagttctatctgcataaccagatttcttgaaagttgattgaccacaccattcgtacatattaataccgtagaaatcagccttgatatcattatcaccacaagaaaagtaatctgctgatggaactctagtatcagcatcatcattagcagagtaaccaactgggatatctctataacctttttcagaaatgtaagatttcatatctctaattgcagctttaacgtaaggagcagaatcagtattagtatcattagtaataacttcattaccagcaaagaaacctaaaacattatcatatttttgcatcatatcgataacactagtatatctatcatataattctaatgaccaagatggatcagtagttgaaatagctacagttggttcagctaaatctgcaataatgtaaatacctgcatcttgaaataatgacatacaagcatcatgatcagcttctgcatctaatgcataaactcttagaacattagtattcaaatcagttaagtaaggcaaatctcttctacaagtttcttcatcagctaatggatcaacaaaggtagtgttatcactagtaccgacatctttttgatatgcaatacctctgatgtaaaattgtgattggttattagagtagaaaaatttgttaccgacaacttcaatagttggaaaatcatcagcatgctgtaactttagttaaagcacttaatatagaaactgcaactgcagaaaatttattgaataacattcttgaactttaactgttgattaaagaattaaggaattttcaagagaatgtgtaatactaaaaagatatattacaaggtcagaatagaagagtataataaaacgaaactagagtaactaagaaaacagtaaagtaaaatgaaataccaaaatacagcaactttgtaaaactttcatgaaaatatttccactttttattcattttaatcatcaccacctcgataaaaagaaataatagctgtttcaccgtggaccgtcgcgctgttgaccgtgcgggtattgatcttttgcccaaaaggaaatggccgctaatagaaaaattgtttcccagcggctgaaccgtgtttcacattcatttagtgggccagtcctgagggccaacaagtaaaacaaaaacaaaaacaaaaacaaatagcctctcgtttcttttgtgcgggttccaaaattttgcttcattgcttttttccggagatcacggagttaaaatatttttaattacgtaaagtatcagattattacacgttatcttaacttaacttaacttacaacttaacttaactttaatttgaaatacaaaatacaaaatattaaaataaaatcttaatacacatctacatccagtaggttgaatatgtcttatgtgctggtttatcacgttgaatactatcaggagcacgtggaccagtatcattgttatcttgatgatttggttgaatcaatccaaatgattcatctggtaacatcgatttaacattatcttcaaatcctaatgtaacaactattggggcaattaatattatagcaaagaatacaatgacacaaaaatatagtaatgcatatctactagcttctctttttctccttttctcagttgatgtagtataaacaggttgccttaatttactcattggactaatccacataatcatacatgaatgccaatgatcaatatatggaatgaataatattggtgtaagtaaaatcaatataccatgaccaatgaaaaaatctgcactaaataaactcatctcactaatcttaacaataaactctcttaatggttgtgtaagtgcatatctacctaataaaacccattttcctgaccaccatgctctattacttaagtcttccttcatttctctacttaacattaacaattttgatgcttggaataaagttctttgtaaaaatattgatgaaacaagtaaaatcaatgttctactaaaattaaatccttctaaaacccaaactaactcaaattgaataacatgaattataacacctgctaaatgtgcaatagcagctaacactgatggaatcttggtacagcaaagtgataaaacaggacctgcaaataatgataatggaaatatgagcactaacactattgtattcataagaattggaaaagcagtaacaataattaacctaacaattaaattaacatcatgtggactagatacaccagactgtgaattcatgaacatataagcaataatgatgaaaaatgtttgtattgatggagcaaatatttccgcaaagaggacattcataaatggagcttttctgttatcttcctttatcttctcattttcatgatcttttaactgatgtctcttaaacccggtaaatttagatcttgtaacccttgtatatgtgatccaagaattcaaatgccatttggagttaccacgacttaaccatctaacaaattctctgtaatcaataaagaaatcagtccatgaaaattgatgtggattgaacaaaaatggtgataacgttaatgaaatcattgtgatccaaaaccataaaatagaaggttgccacattgtaatagttgcaaataataataataaaaataaccttgaaccaaagtaaatggatgttggagcatatgcagagaatagtttagtaaacgaaacccgagtaattgaaaatccacgaccagttgaaatgtatctggcacccccaaaaataatatccttctttaatgaatctgtgtatatttgacaaacaaaaacttcaaaaattggtgataatgacataaaatgcataaataatctacttgccgctttccataaacctctttctgataattcgtgtaaaactaatggaacaaatgaaataaaaaaacaaataaaaatggataagacatatctgtaaacccaatctaaaacaggttgtaaattttgacatccaaggggaacttgtagatcagtaattggaagatctttatcataaaaacatggaattaattcgtaatttaaagcacctaaattaacaactgttaacataaaaatttctaatgaaaacataataaaaagattgttgatatggaaacctggatgagcataataaaatgataaaaatctatccaaagccatttgggtaccaatataataatactctcttgataaaagttgttcacccataccacctccaattttagttgtgaagttcaatattgaaccaaaacctaaatccctacctttaccacattgaaaataatcacaatgcttaattcttccacctctgcaaatggcattcattcctgcatatatatcttcatttaaatgaagacccttttgtgcctttgatataccacctctagtacacataaaaatagaattcaaaaaatcaggatgaccataatgtaatttacctccaatttcagataaagttctagcaaacatagtaccaaaagtttgttcctttgaagctgcaacatcacctaacacaccagagttttcggagaaaatatattctctagctccaacaatagcaacagggcttacatttttatagtgtacagatggaatgtatggattctcattatcttcttccaaattttcaaattctgataaaactgatctgattttaaaacattcttctaaataattatcttgattggcatcaatgacttgaatgacctcacctctataataaataatggataagttttgattatctgacttaccgtcaccaaggattgggtttcctgatagcaaaattttatatttctgtttcaattcattgccttttctcattggatcattttcatctggcttcttttcaacagtatataaaacagagtaatattttacttcattagtctccgcatcaacctctttttgtaaagaagcaattaaaatagatggatatgtattcactaaagctttcacatttgccaattcattttcattaaacgcttgaagtctttgcattgaaactagcatcctaaatttcctgttagctaaaatttctaaataatcttcaaatggtttgttactatcaaaatacgattccatttccggattttcaactttatgtaacaattttatagcttttgtataattcataaacccagaaatagttctgtataacgtttgtgtttttaatgatgcccaaattcgtgttctcataatgtattctggagcagatgatttgtatccaatacaataaagaggtaaatcattaattttgttatcaacaaattccttttctgatttcatgaaaactgatgatgattctggtttatcttcatcggtagtatttcttttagataaagctaaaactttagtatcagcaacaaaatttttccattcactttcatgcattactttcaaatattctaataaagacatttttgaacttggatcttgtttaataatttccttcaattccattaaaatcttttcggcatagtggggaataaaaacagtaaattggggcattgcttcaactggaattggctcaggaacagaagtactcaaactttgagcaaaaaatattattcttctttcagcttcagaatttggaaaaaaataatctgtaatatctttaccactatcatcttgataaagaaaaaatgatggagcccttaaagccataccaccatttgtttcatctggaactaaggaataaatcattttttgtgcttggtctgcagatatcatatgctcacgaaaaagagatataatgaaagcattccaaacttgtgagatcaaataaacaggttcatatttaacctccatttttgatgtagctaaaagtttagaataaatacgtgatggcaaccttgtgaaaacatttctccatggtgataacatcgaaataccacttgaaaacgacaatgataatgaaataacacaattccagataatataccaaagataagtgtctaaaaagaacaaaatcaaatctgtcaaaaacatcaagcccaaaacaaaattgttttgatatctgcataagtattctttaatataatgatcgccgtggcatcttgataaatcaataatatttaaatttctaatcggatccctcaatgaaagagttaagaaaaagtaagattcagtaaatttagcaccgaaaaccaaaatccataataaaattgaaataactctactatattttcctaaacttgggaatgatgcagtaaaaactttaatcggatcatacacttttttattggaaaatgaaaaatcaaacatttgaaatggagcttgaaatgataaccaaattgttgttaaaattgaaataataaattggataatggaaacaatcaaacctgcacgtgaaatgacatcaaatggaatataacctaaaacaaaaatagaaggagcaaaatttactatggtgataagaatcaataaaaataatcttttccaaaggtttggtcttcctggccatttctttggaacataagaaaactcaaaaatagttgcaataatctcaacaagacatccaacagtactacctaaagaaacaatagaaaatctagattgtaaagttggttgattattcaaaagataattgtaatctttagtatacaatgtgggtgaattgaaacttgaataataccagaaaacatttaaatgaataatccaaattctactgaagttagtagccatatgccaccaagaacgtttctctctataagttttttgaaaagaagaagaccaaacaatatcaccgattctagagtacctttgttcctttgataaattcataaacttttctttaccattttttgtaagtttcaaatttttcaagcctttgtaataccaaaacaattggttcatgtcatcataacctataatttgatgatgatctttttcacgtctaatatattcaccattgtaaagtttatattgaccatcacgataaaattcatataaaggagtaataacacggttcaaatagtcatattctggaaaacattcggttgaaccaatttcttttctatcaatcatataatccaatgcacatttgaaaacaaaacataatagttctggaacaaatcttaagttattggcttcaccccatatcattaaataaagagcaagttggtaaaccatgtcttgaggagtaagatcgtacattcttcttctccagttatattcaacaagttgaacttttgaagttgcataaaaatcaaaatccaaactttgtttctttcttttctcttttttatatttcaaaagatcaattccatccataattcctggatcttcgtctatcatggcacagaagtaccatttcctataattagaatgttcacctccaatataatctgcgtgaagagagatcaatgcctttccagcagaaacacgactagcttttgaatctagttgagacatgaataattcaaaaacgttttcacagttatctctctgaaatccaaatataccacgaacttcatcaaatattgtatagatatctttagaagtgattggttgttcatcatcagtattatatgaaaaatacaaatcagcatctaactttttctctgcttcttctctcaattgacgagccgactttttagcaatatgatgcaccgaaggtggttgacttggagcattctctaatggcatggatctatttatactttctaaaggttgggcttgttgttgagtatttgagcttttttgaacagattgatttggctgttgattggttaccatatcatcgttgcttccagttttatcattgttattagcctgatttggatcttgtacaaaatcatcatacatgaagtaatcctccatgttgactggccctatgatatttgaaagtagaaagtatgtatattggagtaaagagccgtttaaaggcaaattagttttacaatcttgtgaataaagttggttttgcaaagttgccccgttcaaatggtttgatagacaacattttcctatttttaccttgacctcgtatttatttcaagttattgttactattcaatccatcttatttaaaacaaaatgatgcatttaacatggacatgtggatgcctgtgtatactttatattttagaaaggtattaatcattctttagtatattcaatgttgatgctaatgaattcaacaactccaattgtgaaattcatcatgtgattacgtaatctctggaaaaatttattcaaaaaaatttcagtactagtggtgttcaagaggaatcaaacaggatcgacttggaagagttatattatgagaaagtcataacttttaaacctaataacaaagagaatcacttattgatatttatattataattataattttgtaaggttggaaaaattttaattgaaaagaggaacaatatatgaacaatttctttaataaaataactaggaaaatgtcaactttaacatcattagcacaactcaaacctccaagaaatgttggaatgaccaagcttgataaatcaaaatttaaaattaaccgaaaagtttgggctttgatactaccagaaattaaatacattaatggatttttaaacaggaaaaataatacacaatcaattgcactctcattacctcaacagacttcactagtagaattagataaggaaacattatcacctgatcttctagataaaatttctgcaaaaaatcctaaactcaaagctttgcttcttaaagaagatataaatgttacagatgaagatttaaaacatgaaactgaacctaattacgaaccagaattattaaaatctaacgtttctgatgatgtttacaataaattgaaaaatctgggtgcaatctacaaagtgtacgacttgaattttggttttgaatattgggcttatgatgatattcttaaatctgttttaccagatgacctaattgaaaattgtccaagtgctttcacaattgcaggacatttagctcatttaaatttaaaagaacaatacatgccatatagaaaaataattggagaagttatttatgagaaattcccaaacatcaaaactgtcgttaataaaactaataatataacatctgaattccgaacatttgaaatggaattattagctggtgaagataattttgtggttacccaaaaggaaagtggatgtcaattcacttttgatttccaaaaagtttactggaactctagacttgcaacagaacatgaacgattaattgattcatttagagatggtgagatagtttgtgatgtcatgggtggtgttggaccatttgctgttcctgcaggaaagaaactatgccttgtgtttgctaatgatcttaatccagaatcatataaatatttaaatataaatatagatcaaaacaaagtggatacatttgtcaaatcattcaatttagatggtagagaatttattaaacaatcacctaaaataataacagaattccaaaaagttacgccagaaatcaaatatgttgctaaaaacataaattcaggcagtaagaagcaaaaagaacaaaagaataacgatgaacaacctaaaaagaaaagattatcacatttcactgtaccaaaatttgcttcgcattatgttatgaacttacctgattctgcgattacatttgttgattcttatattggtttatattctaatggatttgatggtttaacaaaggatgaagtcaagagtttacctggatatattttaccgattattaatgttcatcattttgaaaaatataaagatgatgaaattgaaggagatgttgaaaaagaacttgaaagaagaatgcatctaaaaattgttgatcaattaaaatttgatatccctatagaaaacattaaatttcatgttgtaagacaagttgcaccatgtaaactgatgtactgtatctcattccaactacctgaagaagttgcatttgcatagtaactgttataaagttatttgataattaatcattaatgcatttctataaagctgtttataaaattagttagaaaagttacactgaaaagtaaaaacacattttacacattatggtctatttcccattgggccctttttctccatcttacagcactccaaaatgatccataactccaagttaaatcttctgcaccttccatatatcctgtatatttattgaactgttcactcatatggccatcagcatcaacatgttcttgaataacttctaaaaatgcatcagcatatttcattaaagataatgtagtatcaacaaaagcatctgatccgaatggtaaaataactttttcagatttagtattagggtccaaactaataaaattagaataaaatgaaaattgatcgttagtgataactaaatccttgttatgataataaagataataaaccagtttgaataacagttcagaagatgtggcagttgcaataaaccatggattaccttcacttattccgagcccgtcgtatagatcttcagggtatctacctatagcaaaccctttattaaaagtaccatcagcatgatttattgggtatctatatttcatatcagttacaagagcagctaaagtacttaaaactgaagaatcatcaacagaaaatggaatatcaattatatcagttggatcatctaaatcatgtgctcttaatgatgctaatatggaagcaatatctaaaccacatcttttagattcagccactaaagatggtgtttcgattaaaaatggtatatttggaaccttaaaaccagaatcaagcagaatgtacagtctcaaagcagtaaaggaagttcttaatctaaggttaaattcataatctttgaaagcttctgaaagtttaatacccatctttaatgattttaacattgtcaaagatgtaaataaatgaatagagtcgatttcttcccataagtcaaatccatccttatcccatttgttaatcacatacgttaaatctggttttaaaatttcattataaacaaatgaggcattatgaattaaatttggatataacacatcaagatcattattttctaaaaaattaagataatttattattgttataactctaagaccaggcccgtctctttgaggtctaccccaatgttcatcaaaggtagtggtatcaggcataaattttggctcccctaaactatcaagtgattcccaggttccagatttattgtctaatctttgaagtttataattgttggcaatatatgattcaattgcaaaaaagagcttctttgaatacgaggattctaaatcttcaatattatcatttaaatactcaacaattgaattaacggtaatagcggcatctctaacccattgataaaaataatttggatttgattttgaaggtgatgcaataactgcaccatcagaaacattttgaagattagtacctacacctccaatattttccaaaattctagaaaatgaaagttcatactgatcgtcaatccatgattcaaaattttcatcagtagtttcattcaagtggtaaatactttgaataccatcatcaatataaatttccgatggttccggtttatgcaagtagcttgaaaaaaatgattcaataaaacttttgaaattatccaatggtaaattcgatgcagcatgatagctttgtaagggattggcctcagctatttgaacaagtggaaacccaacaactgacgttgatgagattaaaagcagtaaagctgctttcattgagttattaagcattataattgaagcaatataatttaagaaataaaaaaaaaaaatagataatattattttaaaagcaaaattaattttaaaaagcaactagtttaatatataatgaagtctaactgttttgtgtataagattgatctaattctagccaagctgtctataataaagaaatttaaactctaaagtataaaaaccttaagcaagtgaaaaaagaaacaacttttaaaagggaaacataaaaaataggggaaagtctggggattaatgttatcaaaataaattgataataaaaccacaattagcatcagttgagcccctttttcacagtctaaaaattatgtccctgcgtcgctagtcgccgtttatttcctctttgggacccgtctccgaagcaccgattattataccggagatatggggtagtacttatatataaaagttatcattatttgaacaaggtttctggtaacaagtattgcttccttttattggaaataaaacctaaaaaaaggtaaacaagctcaattatgactcaaaaaacaaagaaacttatacaaatactttctaaatatgctacatgcgatatgtcagatgcattagtcaaacaaaagaataaatatggtggttcattaccaaatttaaaacgttattcatcaaataaggagggtaaaacaatggttggtaaggcatatactattctatttgctccaaaggatgatccaagagaggcaattggtggtggttatattgataaattacctgaagattcagtattggttattgcaacaactctcaatttacaaaagaaagatgctccatttactaaaatgactaatgcattatatggtggtttaatgtcaactagagcaaattatttgaaaagttcaggtacggttgttttcggtagagttagagatattgatgaacatttagaattaaatagagatgtattttcattcggtttaggttccgcagctcatggtccagtcgttaaaatggttggtattaatgttccacttgaaatcttaattgatggttatcctgagccctatgttgaggttattaatcctggtgatattattatgggtgatgataatggtgttgttaaggttgctgatgatgaaaaacttgagtcaattctagaatatattccaaaaagagttcaggctgatactctcgtgaaggaagatattcttaatggtgaggaatgtacacctgctcaaaagaagagaagagagggtttataatagtataaacaacagcttattatatttatattaagtaaagcatatatggtatgtagtaaaagtaaactatgtaaagcaacttgctctatggaaaagaccgaatttgttcaagtaggaagaaaatttaatgctcacaaaacttagtgatgataaaaaaattctttgatttcttaatctctgtgcaagttgcaaaaaaaaagtttagttgtattgatagatttttctttattattagtaacctataacgaacaaaatggtaaaggatactacatactatgaacttttacaaattgaatcaacagcaactgatttagaaattaaaaaatcctacagaaaactggcaattaagtatcatcctgataaaaatcctgataatgaagaggctgcagaaacatttaaaaaaattagtgaagcttatcaagttttgagtgataaagaaaagagattaaaatatgatcaatatggtattgaagaagcaggtgccactggtatggcagatccagagaaattttttgatgaaatatttggtggtgaatcatttataccatatattggggaattgacgttattgaaaaatatgacaaaggaacttgaactttcaaataatgaagccgcagaacaagaagctgcagaacaagctaataaatattatgaagaaaaccatgtaaatatatcatcaaacaattatttaggtgatgcttctctgaatgatttatctcttgaggaacaacaaaaattaattgaaaacgaaaggaaaagacaacatgaattagaaagagaaaagatggaagaagaacaaagccaacatagaaaagaaattcaagccgaattgacaaaacaattaataaatagattgtctgtgtatactgaaacagataaatctgatgatataaagaaatcatttcaagaaaagttcagacttgaagctgaaaatttaaaaatggaatcttttggtttagaacttttacatacaattggtagtgtatattataataaagctagcacatttattaaatcagaaagtacaattcttggagtaggtgggtggtttggtactctcaaagaaaagggaggtattataaaagatacattttcaacaatcagtattgcattagatgcacaaaagacaatgcaagatttagcaaaaatgtccgatcgtagagaacgagaactaaataaaaatgctgaaactggagaagaaggggaagaccaagctgaagaaaatggtgaagaacaagcaaaggatgactctcgtcctgaggaagaaagtgataagaaggataaaaaggatcctgaagatgaaggacctgtaccaacagaggaggaaatagctgaaatggaaaaactgttgatgggtaaaatactagctgcggcttggaaaggttcgcatatggaaatatcatcaaatttaagagaagttgtctccaatgttttatatgatgaaagtgtatcattatcaaagagactagagagggcagaagcattgaagttgataggtagtgtatttaaaaatgttgaaagatctaaatgggaagctgaagaagctaaaatttttgaagaattagttgcagaggctacttcaaaaaaggcaaagaagaaataagttataagtgatactacttgtagatattaatgataggattattaaattatatgtacagaaagttttataaataaatagaggtgaaatgtaattattatgatcaaaattagttcttttcaacagaataataaacttttcttaaatcaacaaccttctttcctctttctaaggccatttcttcagttgtcttttgttttaataatgcttctatagtacatttaacaacattcattttatttcttgatctataaacttttgaagataaatcttttataccagcacattgagctaattcgaaaatcattggattacatcttaaaccagaacctggaggtgcagatcttaaatgaacgacacttgcaccaaatttatgctctatattaccaaaaattgttctatcttctaatcttggaactttaactaaattctttactgcttgccaatgagcttttaagattgcggtacctggttcttcagggtctttaccttcaccaatacctaacataccatttccatcaccagcacacacaagagcatagaaggaattaattttaccctttgaagtttgatttctaacagttttcaaaagtaatgttttaacttttaaacccataatatatctttcatcgaaaaccagttgcaagagataatttctttgctaattcacctaattcagaacgtttcttagaaccttcaacatctaaaatttgatttttagggatatcaatttcattaggttgagaaattttagtgaagtcaagtggatcttgttcttgatgatcgaaataatcactttttttagtgaaatctgttaaaaaatgtggagcaaattgaataggatttaattttctgttttcataatgttttgggtcaatagcagtttcagctttaaggatagaatcaactatttcagggtcataataattaagtaaatattgcatatggtttactttctttggatccagactacttacttccttttgaagtattattctggaagatgaaaacatacgcttactcacagtttgaaacatggtgttgcttatatatgagtggttatggatatatctattcaagaaactattttcaagacttctttcaccctatagtagttcaattcatgcattggacgaaaatttcaacattcactttggaaaaaaatattaaaatggcaagcttattcaaagtcgcgactctcggctcagcatgttcaaaaaggttagttagttaatatatggagtacttcagttcatgaataaacttatttattaaacaatttatacttacaagagagttatttataaacagatatatgtatagatttagaatctacttattttatttgcattggagcaatgacaggttgtggaatcgatttgactggagattcaccaagtaatgcaggagcaatagcaacatgaaggttatcaacttgtaattgaggatttctgtttaatccattaacgacaacttgtgcattaactttcaattgtggagttttgtatgatttagctggatcaaagattaattcaggtctgatacctttaacaacacttgcaattgttgaatcaacttcttcagctgaaatattttgtaaattctttaaattagctactgatctctttaaattagaaggtaatgtattattagcatatgggtaaagagttgaattttgtggaagatattcaacatttctctttactgagtctaataatttaaatcctcttctcattgtaatttgttctaatgcttttaagaaacgagattcagtattgtgagctattttatcctttgataaattcaattcaagtttattaataattgatggcctatatggtttaactgtatttttaaattcagcaaatttatcttctgatgatgcataaaggttagcataatgattaatacgtgcatttatgaattgatgagttattttgttttcaaatgttggaacaacaggcttaacatcatcagatgtctttcttctaataaaaaatgccttttcttcaagttcttcagcaaatttcatacctttatcatttaaagtttgaacattacgaccaatatcatcctttgattttttatttctatatctatcaaaatcagagactgtttttctttcagtcgatcttgaattactaaaacctcttgattcttccttttgttctcttgttctataatttgaacctctctttgatggagatttattgaatgaacggttattttgatatgttttcttattatttctaaattctggtttgttagatgatgtttttctatccttattttcacctctagaaaatgatttcttctttaatgaaggattagcagtttcagttgataaagctgcctcagtctttgcaactgttgctaattgatctagtaaatttttagttaaatctgaagatccagaagcttcagtagccatacctcttgcatttgcaattgttcttaatccagctcttgcaaacatcttgatttggatggctcttcaaagatatttatatctatactgaaccaaggtattagtggtcttctcctggaatgcatttatttaattcgacgactggcatgtagaagaacttcaaatgaaatttttcataatatccgggtaaattacattacgtaatatatttccgattatctacgaattaaaatcacgtaatttctttttaatacgtagaaacccggggattcggagtggtgttaaaaaaaactaatttttcactccgatataaaccatgatgtgtttaaataaagaccgttttccatcatttattaatataaattattgtaatagaactgatgttcctgattcttatctttcttatgaatcatttatacatcgctattttgagcaattatgtccttttttttaaatatacccacggaattacaattacgagtattggaaaatgtttctgttgatactttacaaaatctattaataactgacaaatattttaactctattacattatcttcaattcattcaactgttaacacactaacagcttctgatgagaggttttattttagtgttttttctcctcaagtgaaaactcatctgatacaaactttcaacacaacttgtgtatcaacgcctattcaaaattcacaaataaataccccattaaaaacagagagtgatgataaaacattacttgttgatttaaaccgtgtttctgaaaaattaaatctaatatcttctaactcttcgttatttcaatctatgaattacaattctaatccgttctcaccatataaatcagttttcaaactgggtgatcttcaatatacccgaaatccactgaaatacaattcaactaatgttccaactaatgaggactccacaacatcattatctttagtggttaatgaagatgaaccatacatcagtatacagtttgagatgcaaatgaaaaaagatatatcatctgataatttatcatcattatttaaagtccattcaagaatttccccactgaaagagattggtgcctcttcaacaggtgttttatattcagatgataaagctgttatggttgaatattcaattttgaaagaatcagaagtacccccttataatggatacgattatgatgtgttccataattataaaataaattttggtaatatagagatcaacaacacatacttacttgatcgtattgaaggttgatttccttgataaatgtattacgaacgatttgtacaatttatattttgaaaatcccttacttaaaatatgtttatattaatatatattcaaaattctaataatataaaagtatagttataaataaagtttgtgactgaaaagcattttgtttaagatggggagtaccatttcatggtatactttctagcagctttaccattccagtacattataatataagatccactggagaccaaacagaaacaagctaacatgatagtagttcctaaaacaccaacaccatccaaccaatattggaaaacaaaggtgaaaactgtagcaagtaagtttctaacgactaagacaggatgtcatggtttgaacagtttcaccagggataacattctaaaacataggtaacagctaatgaggttgttgtacatataccaaatgaaattaaggcaataccgattgctgcaacaatccatggtgcatccatataatggacctaaaccatacataaataaaccaccaatatttaaaatcaatggaacaatattcattaataaacggaattcaggctcaaaaataccaccgtttttctgagacatgtaaatgacaaatttatcatgaaaaagcagcatatataccaccaattgtattaccgacagtcattgagagatttaactagcccgagtgcatctgctgaaaagttatatggtggtgcttggaaaaattcagattgtgaaacagtaattaaagataaccaacacatttgcaaaccataaacaattgctgcccaagtaactgcaggatatctcaaaacaattaagtttttaaaatacttaatactgaaaatttgttgtctgtaataataaatggtttcaataattcaatatatgtttttggttttatatcctttgaaatctttaccctttgatcattatccccatcgctatatgcgacttcatcaacattaaaattaagttttctatttgactctacgttatcactagaaagttcaacttcatgcatcatgtgacttgtttgataaaacaacttttaataatttctcttcaacaacttcattggtttcataatgtctaacataatatgattcttcaagtaagaaaaaaactgcaactaataaaccaccacaaatgataataaccatatatccacaccaaagccagcctaggtattcataaatataacctgcaaggaacggaccaaaagatgaaccaataccgtttgaaattaaataaactccaataaacttaccatgttcgtgtaaaaagaaaacatctgcaattgaaacttcaactaaagaatcaactggaccagcggaaaaaccattgacaatactgaaaccaatataacctgcaaatgttctacgagtaacaaaaataataccggaaataattgctaaaattgttgaaaacaagtaaattggtcttcttccaatttttgctgccacttcttgacataacaaacaactaatagcaataaacaaccatgcaataccaccacctgtatttaattcattataagaacaattatatgtttcagccattacatcatatattggaccatcaaaattaactgcagcggcaacaattgttgaaaagaagaataaaacaataaaatgtaaaactttcctccattgtgcccaattcaaaggatcatttggatctgatgatggctgagggaatagaataatatcactattttctttggtatttgctaaacctaaacctgtaatttcttcaccctcaccaactaaaactgttgtacctggaatagttaaatcatctcttaactcttgacttcctctactgaaaaacatgacttgtttgttttgtattgttatacaaaatgaaattatttgatttgatttattttaaaataactggaatataatgttgctttaaataagatagaaaaaatataaaatttgatgaataaagaaaatatattatcttcttatcttgataagttttctcttgttcttcttatcaaattgggtactgtccgatgttgtttttagttaattcaagtatttatcaaaaatctaacatcactattcaaataaaattgttttgattaggcgattgtacaagatcagcggtaaccataaggatgctaaggtttttgtctttagtactatcacaggtttgtcctttatcttaacgccttccgcgatcataatttaaaaaataacgtttttacacagccgcgcggtagatacaatcaattatttcctctttgggactgataagatttcttaagggcggatagcgtctatttaagaatcattagtgttaataagttaatgatactggaatccgtttaaaaagtcacaacaatcttggaatctacagtttaagatacttgaagctaaagaaacaaaaattcttcataacaccaatgaccataaaattcgactggaagaaggctgccgaaataaagaaaaaagaagtggattcaaacattccaaatgagtggattctaccttctgaaattttggaaaaatacgatgaaactacacctgagtctgttctagatgtaccaaaacaatttttgaatcctaaagaatttgaaattaccgaattttatactgcaattcaattattagagaaacttaaaaatggcgagtttactgctattgaaattgtcaaagccttttctcatagagctgcaattgcaacacaattaaccaactgctgtactgaattaatgtttgattatggtgaaaagagagctacatttttagatacatatttgaaaacaaacggtaaaccatatggtccattacatggtttaccaatttcattgaaagacagtttcaatattcctgggtatgactcaacattgggatatacctctgagattggtaataaaccaaaaaacaaaagtgatttagttagggaattggaagatttaggtgctgttttctatgtcaaaactaatattccccaaactttaatgactgcagattcagagaataacatttttggtagaacattaaatcctaataatttgacactaactgctggtggtagtagtggtggtgaaggtgcattaatcaaaatgagaggatctattttgggtattggtactgatgctgctggatcaatcagaattccagctctttgtaacggtgtttacggtttccgtccatcatcaagaagatatgctcatggaaatcaaatgcatttagaaagagatgcatacattgatattgaaactgttgcaggtccattatcaacagattttgaaactattgagtttttaacaaaaattatttataatgatgaatcttggagatatgaccctgataactttagaatatgctatcaagaaccaaaaattaaacaatcggataaaatatctataggtattattcattgaagatccagcttttccagttcatcccacctttacaaagaattcttagagaagttgcagaaaaaattatcttacaatggtcatcaaattgaattcattgaaaatttcccatcttatgaaaaatcatgggaagttgcatggtcatcatttgcaactgatcctaaccagtcagcttaccaaaatctagttctctactggtgaaagaattataaaatctcttcttctaccatagtgatgtatatggttcagggaccaaaggatattgatgaagtcataaaacttaaaggcctgaaattaataaaatgcacaaagattggctttccatttatgataagtatgatgttatcatttcacctggtgcgccaggaactgcaccaccacatgatacttatggtattgcaccttatacaactttgatgaatgttttggattttccaagtgttatcattccatatggtaaaattgaaaaagatgttgatattgatgtggatgttgaatacccaaaaatattagatgatatttatgcacattattcattgaatctttataaaggtgctccgggtcatatacaagtctctgcacctcgtcttgaagacgagaagcttcttgcttgttgttccattattgataaagttttgaaacaatgattctgtcttatttattgattctctatactcaaaaaaaaagtacttacttatatattataaaactatctactacaaataacttatactattgcaaaaatatttggtatgaaactgattcatcctccaagacttccaaacctttattttcctcccatgtaaacttcaagctatctatagctcttaaataacatgctatgtgggtagcttcccactcccaatataaataatcaattactttttcttgctctactttttctctctaatatcaatcctataataaatatgccccactaaattaaacatttcgctatatgattccttcattctcaactcatcaaaagcaacaaagaactcatcaataattccccttctttgagttggaaattttgtgtctgaagtttcaagtagcataagtttgcaagctaacagtgctatataaaccatttttttttcacttttagcaaattcgttgagaaagcaatttgtttcaaaaagaagattcaaatatacttcgtcttagatatgacttttttttaaatatgaatgacgttttggcaataatgtgcatcatatcaatagtatccctaaagtaataagtttgactcccttgtaacatttttaggaaaaaaattcctaaagatatcgcatataatgaatggattgtaaaagtctaatactttattcggtatcatcaatattgataagacataatgataatacaaactttccgtcaaaaacgccagtgccccagttggcttaataaagtttttagtccaatacaagctctattcctgaataaatatcactcaagacttctctgattgtgagtttttatgtaaagctttttgagtatactgaaaagtagtgaaaagagtattaattcagatgagtgtttatattcattacttttttgaatctcctttgttgcctcagtatggatttggttgacaattacatgttttgaagtatctgggctaaatagttgcgcaaccgatactgatgttatcatttttcgaaattcagctgatcttttcaattaaaatcaaagtgaaatcagacgcagcttctaatgattcttttcggcaaaagtaatttgattgtaacattaaagaaaatattgaaacaaggtatcaaatgaaaagttatcatttaagcataatggaatgtgctctggaattctaattaaggtattcttttttaagggtataattttttgttcatcaaatggagactctatttctaaagatgaggtatattcatgtctcttcgagtgatattcacctcctctatacttgggctatatgggggtgaattggtgtaaatgcatgaaatatttcttcgaatacacctatcacattgtggcttgttttcatcacatttcttttttgatttgacacagcttaaacaaccagttttagacctttgaaagtgtctattagaaaaggcattaacaaggtcagatccgttttcatctacaaattgtttgaaagtttgatttgcatagacacattgtaattttctccttgaacatagactgcaacttggtttaatctcatcgcattttttccttgctattcggcatgacatgcatcctgttttagatcttttaaaaaatttctttctatttgcaccctttggctctgtcattgcgttgactcaagaagaaagatgttcattatttatttcaataaagaaaatcatgataagaaaaattggactccgatcttgaggatcaggaatcgaagtcctcaattatgtaatctcattatgtaatcaattttatttcaacatgaaattctacatcgtcaaatcagtacagaaaacagcaataactaaacgtaaatctattttgtaacagtgataatataatgagaacatatctggacatagtgaaaaaggtggatgtggtaccatactctcatgaagctgaatatgatgactttgtttcacatttctttagattaaaatctcatgacggatcatttaatttgggatatttgattccatcaggttgtaaaagagttatttaaatatccacaatattttacgatcaatgacaatattgtcaaattctctttttccttagataccattgaaaaacgtgaggaagctttaaaaataataggtaatgaatggaaaaaccaaggattatttgatacgcttaaaggatggagaaatgaaaaatatacaatatatggaccaataaatgaagtatatttccatttagaacgtgcaatgtgcccattatttggtgttgtaatgtatggtgtacatattaatggatatgttaaatcaccaataactggagagatcaaattatgggttccaagaagagcagctaataaagcaacatatcctggaatgctagataacaccgttgctggtggtttaggatatccatatggaccaattgaaacttgttataaagaatgttatgaagaagctggattagaagaaagttatgtgacgaagaatatcaaatcatgtggagttatctcatatttatatcaattaaaaccatttgattttgaaagtgaattgggattagtacagcctgaagttgaatatatatacgatctgtacatggatgaaaatactatacctcatcctgttgatcatgaatctgaggactttcaattaatgacaattgatgaagtgaaacaaagattgctgaatggtgaattcaaagataattgtggtgcaattatagttgactttttaattagacattcaattataaccccagaacttgaaaaagattatatacaaataaatagtaaattgcatagatatttaccattccctgttagaagtaactaattatttgttttatttttatctagatttataaaagttattatttactaaaatgtaatttgatattcatccattctctacttataacttcctttggagttaatgagacattaccatatgtaattggagcaaagaatacaaaactggagatcaatacagcaagcaataagaagacaaatgagacataagctaaagtgtttaaagtatttggcttttcacccttttgacaccattctaatcttctattgtttgtgaataaaaattcaaaaactgaagcagaaaataatgctgctaataaatgtgcaggtaaataatgatgtaaaaatttttgtctacccattaagaagaatggcaaataatggattaaatatgcacttaagaagaataaacttgttaaataaagttttgatcttgcttcctttgttaaaatatgaatatctctatgagctgttaattgatcaaatacaactatgattgtaaaaactaaaatcattgcacattcaaaccaccaacctggaatattaccaacaaagaaaatttgttgtcttagatcattattagtccaaaatgaaacacctgacatacataaaggccaagcatcaggttgtgaagcaaatgggtgttcacttgataatttattattatgttcaaacattaaaaattgtaattcccaccattttctaaaaatggtaatttaagaacaggttttggaacaaatttagccctttcacctgataatccaacaattttatcaacaacccaattattttcacttgattgaatttgtttattaccattaacttcttgttgactgaatgcccattcaggtaataaaacatcatcatgagtccacattgcaacaacagttggaacatgtaaaaatttaataattgaacctttagttttcaaaatttcatgaggtttaccatcaactggatcaaatttaaataatgtatcagcatatctatttgaatcaccttcttcaattgaaataactgtaaattcttcattagttggatataaaggagatgcaacatcatgagttaataaataaccattagtatgaacatgtcttaatctaaaggtatcaccttgatgaactggtctattcaaacgtttagtcatcagtttctctaactggtaaaatttcccaatagttaggcagcatcttcattacaatctttaacacatgtaacttgttgaccttgagatgaaattctaccatcatcataacgtaatggataattatatggatgagaatgtaagaaacaatcagtatttttatgtttaattgtaatatatcataataattaatttcctttgcttctctagctaagattgaatcacctaaagtttcttgaaattcagagctcataaaagcatcgccaggacctgattttgttaaaattgcaaaatgaatatagaaccaaccaagataaatgaaaaatggaacaactattaatagaacaaatctagcaataaaatgtcttgtaaattgtcttattcgttaaacctgtcttataatctagaagattccataaatcaactgcaactgcaataccaacagagaagaaagttaaaacaccgacatatttagttgaaataacgcaagataatgcaaatccagttaaagttaaccatttataccaattgaaagtgaatggagaatttcttaatttagtgaatttaacataacaataaattgaagcagcaactgagatgattaaagttgcatcaagtaaaatcaatctagtttccgcaacatgagcattatcaaatgcgacaattgctgaacctaagatacaagtccaaactgaataattacattcttttaaagtttcaaacattaatggaacagttaaagtacctaagatagcggataatgatcttaaaggaatataaggaattgaattatcaatatagctatcaccaatattttcgaatttaaatttaccattaaaacctactaaccaaccaacaaaagcgattaacattttagcaaatggaggatgtagatcaaagaaatatgtacgttcaatataataagaagcaaatttaccaaaatgaacttcatcaaaaacaacttcacttggataccaaatgtaataaaatctagttatgaatgcacaaaaagttattgcaatattagcaactgtataaatatgagatgaagttgaaattgttgaagatgatgatgaaatagaagttttagcagatgaaataatatcaacttcatcaatcaaatcaacagagtcattatgatcaatctctacagttttagagaatccaactactcttcttagcgttcttcttcggagccattggcagatatttcaagagaagaaaccttagagaacaaattgctataaagttgacgtgttacaaatattggtgttagagaaagcgagaaattgaaaatttacatgtttatttttcttatgtaagacattgaattcagactctgtgataaggccatgtgttctttctattcctttcctttccttttcttctctgtagatagcagctaagtatgtatcttaatagggtgagaacagtctgctttagtgtctttgagaagtacacatgcacagaaacgtttcttttcatcagatgatatgtttgaagctttcagttcgccatcatcaggaactaaaaaagaatcaaccagtaatgcaaatgcaaaacctattgacccagttattaatataaacagagattattcagcatcaaatgaaccaaaaacttctattagtgatatatttactaaatcattaaatgattttacaccaatagatacaccatctaataataatacaacaaattggtcagaatcttatcatggtttaggtaatgcaccatttagtgttgaagcacaaaatattttaaacttcatcattacctgatgatgatattgaaattacacctgatggattattatatttacctgaaattaaatatagaagaattttgaataaggcatttggagctggtgcatggggtttagcaccacgtagtgaaacattagttcaaacgcaagaatttggaggtttattaacaagagaatatggattagttattcatggtagattagtttcaattgcaagaggtgaacaaacatttttcaaagaacaaggtataccaactgcaactgaaggttgtaaaagtaatgcattaatgagatgttgtaaagatttaggtattgcatctgaattatgggatccaagatttattagaaaatttaaaaaattaaattgtgaaaatatattcgttgaatatattccaacaaagaagaagaagaagatttggaagagaaaggatgaagatgttgaatatccatataagaaataatttacttgtaaatagataattaaataaattgtataactaaaggtgattaaacctgatagaacaaaaaaaaacttacccagcaatatcactcggcaaaacttgcgctccccagatatgttgcccatgaaatgcaaattattactaaggcggatctgtttaattattattataatacttttcataaaacccaaaccaattacttttttcttttttaaaaaaggaggaaaatattactattccataaaattatataaaacaaatgattaatttatttataaaccttgaacagctcttcttctgtctctttcttcagcaatagataatttaatacctttaccctttggtaatgaaacgtatggtttacctgcttcattaccaataatgaaaacgttagataatctagtaatgaaagagttatctaatgaatcctttaagtgaactaaatcgaaaccaccttcgtgtctttctctgtgagtgataacaccaactctacctaaagaacgaccaccagtaaccatagctaatttaccagtttcaaaagcaataacttctgaaattttaccagtttctaattcatatttgatagaatcaccaactttaattgatggatctgggtatctgatagttctaccatcgtgtgtaacaacatatgggatacctttcttacctaattgaaccttcttaactttacataatttgtatgcagcttcttcaggagtaattctgtgaattgcaaatctacccttaatatcgtagattaatctgaagttttcgttggttgcttctaaagtaataacatccataaaacctgctgggaaagtagaatcggttctaaccttaccatcaactttaacatgtctttgcatcaagatagcattgacttctctaccgttaagagcatactttaatctgtttcttaagaaaacaactaatggtaaagattctcttaacttgtgtggaccagcagaaggtcttggtgcatagacaccggataatttgtctaacatccagtgctttggagctgctaatcttttcatgtggtgctttctataataataaaaataataataaagatggagtagagttagtattatgttcataaagagtacgtctcttatagtaaaaaaagataattcttaacaagatttaataaaaaatcttgcttggacaaacttgccctcatacaactttcataaaaaaagttgtaggttgaatacaatctcaatctcaataaataagaaaggatgcaaacaacataataaaaataagttttatgtgaagaataattaccttttgcactaataatagattataataataactaatttgattatcagaatgataactatacatacggtcctctagccatttttgaatatgtattaggttgtctttagaagataagtcaaaagaagttaaaaatggagaaaattaattatacattcgaggaactacttaccttatataaatgaagttgaaaaaataagttgagaatgcgcgcaaagtgaaaaaaatttggaaaaaacgaaaaaaatggaaaaaatagaaaaaagctgcgtcccatatcccaaagcggtaaaaagggtttccaaccctctctttctctctttctcttttactgccaattctttatagcaaattgcttaagtaattcacctaaattaaattcattatagcaatcattatagagactgacattggtaattaattctttaaagagttgtttatcaccatcacatgcaattgataatgcttttagtataaatggttgaataaaatcataatatactacatcagtatatgcattaccattgttttcatatgtttggataacattaggtactttgtaaactggtatctttctatgaattgtatcatctccatcattacccttatcatcaattgtagtatatccatatgataattttatatcattgatataattatcattaatattataattatcagtatcctctttaatagataattgatgtgaatttttcaatttgataccattactaagaatataatcaccactatttaatatccattgtaatttaattgcaatttcacttggtatattaggtataacattccatttattcttaaatggtgatactgtaaataatgaattcttagtaaattctcccttatataaatcatatcttataccacctgtgttaataagtatgattctatcattatttgttgaatttaatgaaaatggtggctcagccttatcattatcactattattatcatcataacaaatttttggtattaattgtggtaaaattgaattttcaagaaatcttaatagtgatttagaatctggttcatccttatgataatattctgctgcatacatgtaataattctgtggtacatatccataaacttcattaagatttaattcttcactatattcgagtaatttttgagaaaccattaatcccttatctgtattaaatttatcaatttcattatgatttgtatgatgcatgaatgaatgtaagttaaaatcaatatatttcctatcgactgtaatattttcagtattttttagatcatcaattgataaaaatcctaattgtttcacaatatctaccactttgtaaacctgttgataattcatcaattattgaaaaatctcttacatgtgaatgacctccaaaatattgtataaaagtatctgggaaatatttccttaatatggaatgtaattgatacatttcaaaccaatcatgagatactggtaaatgtccaaatatgataattaaatcaacgagataatttgttgaataatcaataagtatatcaataaaccattgttcattaattatttccattataggtaaaacttcaactctttcattacccattttaaaatcaaacatgaatgagaatgaaagtatattataaccattaacatttgattggaaatatctatattgattaccaaatgtaacccaattaccatcatcatccatgtataagacattagttgaaacaaatttttcaccataatgtttaaccattgtatcatattctaatttagatacatccgcattatataattcatgattcccaacagttattaaatcatactcaacatttttgaaaatatcattagattttaatccattaggtgatgttaaatcacttaatccattaccatcatgtctatcacctgtatcaataataagtaaatcactatcattatgattatttttcaaattttcataaaatgatatgaaaatccccccaatcggaggaatattgtttttgattagtatgaccaatataccaaccatgagtatctgttgtatgtaggaaattaatctttccaaaagttaaatttcttaaaggttcattaaaatttggtaatttagcgtttaattggcgattgattgttatactgtttaagtatatgagtgtagcaatcgccaatgatatcaattgtgatatgatcatcattatctaaaagaaagaaagaaagaaagaaagattaacctaataatataaaaagtactgtaaagataacataagataacataagataaagaatcatgtaatacctctattcgaatcctcgcacagaatttaattcttcccaccaataaaattttcagtttccaaaaattggaaattggtgaggggaattcaacacatgtaataataataatatagagattacaagtacaatctattctttcaattctacaagggtaaacacagtaactatgtcagaagaattcaaattaccaagacctttctttcttaaggattcagatatatctaatgataagtttgtgcccgtcgatacattctctgaaactaagaaaattacaatttattcagcaattttcttaggtggtatgcacgttagaagacttttacaacatagaatgggatcagctagaccaggtcaagagagatatcttaaattatttgaattagctccaagacatttcatatcaattccatttgctttagcaacttatagttttatgtcaaattctttatataatttagatgaaggtagattaactaaaaatgaaattatttctgcttcatcagctgttttagttgcaacaattttcaaaaaaatcccacttaatcaaaaagttggacttgcattagggtatgggtgtatttgttggcttatttaattggactggtggtttagttggtaatgttaaaactaattttactaaaatgacacaaaatggtgaaattaaaaatcaagaatctaataaatcacttgatgaagattttgctaatggtacttatcaaaagcaaggattctgggaactcttgtatagaaaacctttatctgaaacaattgaagatttaggtgaaggtagaggtattggtaaaatttaataactatactttccatactatttcacactatatactatacacacattatatttattcatctttttataactcattattattcaagaaaaaaaaaattaaaatactataaacacgtatactgtattacattacacattacaattaaatatttgaatgtttaactactactttaactttatcagcacatgaatacattttatttaattttttaatttttttctgaaatcctaatgcacgacttttaatactataactatacttaataccatcatttggtaatgttataattaatgaatgtttagttttattccttgtatctttttccttttcatcaataatttctttatcattaataaattcaaataataatgaacctggtctaatattaccacctggatgaataccacaaataacatgcatcattttaccaattaatttagtccaataaatcattcctttcacctcttcttggagctgattcaattactaatttttccaaatttgaataatatttaatttcacttgatggtaattctgctccccatctttcacataatgcaataccaattaaagctcttgttctatgtgataatccatgactacctgaaattataccacttgttgcaacatgtaatgcagcagttggttgtaattctttagggtatgaacaatgaacgaatgcaatattacataatgcaggtaatattcgattttcaatttcttcaggtactaaatcataattagttttaggtaaaccagttttcaataattccatataattatgagctaataaaggtgaataaggtctaggttgccgttataattggatcttcagatttaattgatttatcaaacatttgatataaaacaccttctctaacaccaccttcactaaaatgaacagttctaattttcggtaatgattcaaaagctgctgataataataaaccaactgaaggtaattgttgttctcttctatttgaaacacagaaaattttatttgattctaattttggaattgattttttcaataataaataattagacatattttcaactttattaaaagttgttgaataaccatttataattgtttgaattggataatcaatttcatttgcaataagtaaatgacctaaacctcttaaaccaccaccacaacaaaataattttaaaccattattattttcaagatcaattaataattcttttggtaattgaattttttcaattgccattttataattatttttaatttctaaaaataaatcatttatatcttcatttttaattctatttgttaaagcagctgcaccataaggtaatgaaaccggagtttcactaattttaacttcaccatttttagaaataatccaacttaattgagttgaaccaccacctaaatccataaataaaccagaaacttcttgaaaagaacttgcaacaccataagaaccaacaataccttcttcttctttacttaataattgaactttccaaccagttgcattgaagattttattcataaattctattgaatttgaagcttctctagttgcttcagttgcaacaactttaacaccatttgaaggtacaccaaaatcttcacaaatccatttaaatcttctcattgaacgtataatttcattaattgcatcttcaggtattggattttttaaatgattattttcattattaatttgagcatcaaataatgaaatacctaatctatctttgaaaacacagggcattatacgagcatgatgaggagcttttgaagaaattgaaaatcttataccatttgaaccaatatcaacaattgcagttaaagctcttgcaacaattgaagcttcattttcattatcattatgattatgattatgattatgattagtattatcattaatattatcattttcattatcattatcattatgtattatatcatcatttatatcaatatcatgattaagattaagattaagatgagatctattatcgaaatcatccaatatatgactatcaggagtatttactaatctagtactatcaaaagacatttcctgaggattaagatcgaacatttagtggtttaaaatgaggtatgataataataataaatcatatacaaatgaatcattaaaagataatttttccatttcccaatatacaattaattaattaattaagtaatacacttattactcactgatattaatattagtattagtattttagtaatttcctcgctgttaattatattaataattattactatgaggaattggatttactctattttatactggtatattagtatagtatagtagtatagacattgatatagacattgatatagacatatcacatatcagataataatacatatgacagaatacgatattgattttacacgtattggtaaatttttaacaagatgtaccattaatctaatattaccatttatcaatggtatgatgatgggatttggtgaaatatttgcacatgaactatgtttcagatactcatggcaatttgcaagagttgtaccatcaaatagaaaagtatctactggtatacactcttcaagtatactaaacagggcataatatgcagtattaatcattcactcggcataattaggtaatataataataatttaataagagaggggggctcgtcatctatttaagcataaactaactaccccacaatcaattatatcaatatcaatattactatcaagtccccttgactgggggtttaaatagaattaatttcccacaattagatatgtatgtgtatcaatctgtctaatactcttttatagacaaaataactaactattcaataatggactcaacaattgctagaggtaatgtacttctcattaactcattacattccctactcagtttttattcaaggagacgtaaatcaataactagatcttgttatttaataattgtctatacattatttgcaactggttcaaaatcaaagaaatctaaaaagaaattaataaatgataaaaatactactactaccaccccatggtggaaatcaatatcttccttaaaggacataaaattattatttaataattatcttgaaaattctccaactttatccctattatctcaattaattcattcaaataatataaatactctaattcattttatttctcaaatttcactcttatttattaaagcttggattgccctaactgttgctaaaattgatggttcacttgtatcttcattagtttcaagaaaatttaaattatttttcaaatatttatccttttggttattattaggtattccaacaactttaactaattcattacttgttagatcaagaatgttactatcttataatatccgtcaagttttaacttataatatattaaatgattatttaccatcaaatgggaattcaaccatttatcaattaattaattcgaaaaatccttcaaatatctcaatatcggatcctaatcatagattaacttccactgtggaacattttgcaaatagttgtgctattttaccttctcaattacttgctcctgtattggatatcttaattgctggtaatcatttatcaaaatcaagtgaaaattcttcagaagggactcttttattaggtctcgttgctaatttatcaacttttatattaagattcttcactcctaattttagttctctaaattcaatgagaaattcattggagaataaatttttggagttccattcaaatattatattaaataatgaagaaattgctcttgctaaaggtcattcaaaggaaattgatatcttagatgtatcttattttgaatatgagaaatttgaaagaatgtccttacgtagaatggctatttacaattttgctgttacttttatttttaaatatactttaggtgcttttggtattttcctttgtgctgtaccttcattcactgcagtttatactaatggctttatccaagatgatgatgcaattgctaaattatcttcagattttgttgcaaatagaagtttattattaaaggcaagtgatagtttaggtaaattaattcaatcaaagaaaaatattcaaaatataacaggttatgctgatgaaatttatgagtttcaaaatattttacgtgatataaatgattttgcaaagattgaatcaaatatagatactaatactactacaggctccacaaatgatgatgcattattggttggtccaaatgtttcttatggtgatgaaatcacttttgaacatgtaccattaattacacctaatggaaacgttttggtcaaagatttatcattttcaattaaaccgggggataatttacttattattggaccaaatggttgtggtaaatcatcactttttagaatcttgggtggattatgggatattaaagatccaggtaaattaattgtacctcattcaaaaaaagatttattttatttacctcaaagaagttatttcacttatggttcattacgtgaacaaattatttatcctgattcttatgatgattatagaaataaaatatttgaattaaagaaaaataatccaaatgatgaaatcattaaagatgatgattatttaattaatttattacaaaaagttaatttagaatatttacttgaatgtgattattctgatgatgattcagatgatgattttagtagtaataacaataatattaatacttctaacttaatagaacctccttcatcatgtgttttcatgaacccatgtttagataaaattgaaaaatggccagatttcttatcaattggtgaacaacaaagattagcaatgattagactttattatcatcaaccaaaatttgcagtcttagatgaatgtacttcaagtatttcatcagatttagaaagagaatgttatagaattgcaacaaaagatttaaaaattacagttttaagtgtttgtcatcgtacaacactttggaatttccattcaaagatattaaaatttaaacgaattaatgaaaataataatacatttgataataatgaaggtgcagcaacaacaattttcacaaattttgatcctgatttaagattacaacgtcatgaagaattaatttcgattgataattcattgaaaagaagtgatgaattatctaaaagattaaataatttaaaaaatatgaaaaattcaagaagtggtagaagacctgctttaatgtatattgatgatgatgaataattatatagttaatacaatatagttataaaaaaactacacatttattctcttcatgcataattgtataccaatcaacttttgttgaccatgatttaaccattatatcaattgcaacatcagctgaaactgaacccatttgttggaaatcatttaatttttctaaaaataatttacgtttactaatatcttgacattcacaaccagctataaataatggtaaaataacacataaagattttggttcctttgtatttaaatattttgttaatgtatttaaaatttcaattgacatttcttgtataattttagaatttgatggcatcaataaaactcttttgtataattgaattaatcccattaataaaaaacaatgatttgatgcaataattgcattaattgattttgaaattaatgtatttgatgtattatcatattcaacatattttaatttttgaaatttcatttgaatatttatagctgattcaataatttttggtgttaaagtaacagaatttatacccattctttcatttgatcttttaattaaattaacatatttaattaatttgcacaatttggaaaaaattggtaaaaatttaatcttaaatccaagcatataatcaatatccaaatgagattcttcctttaaaacaccatttgtttcgataacttcataatcaatttgattattttcattattattttcattatttaaatcactcaaaatttcattattttctaaattttcaattttttccctggatattattatatttggtgaattaattaaatttgaatttggtgatgaaaaagtatcagaaaatggtgataatgaatcaaaattatttggacttttcttacaattattcaatatttcatcaattgttggttctaatggtgatgataaatttgcgaaaatatcaatatatgcaaaccatctaattaagaaataaagtaattttgatttcttaatttcaccactaattaatgattcatcattttgaaaatcttgaattaatttattaaaaggtttattataacctctcattaaaaaaatttgctttgctccattcatatgaactttccatttatctgaattataattaaatgctaaaaatgatgaaaaaaataaaataattgttaatgttaaatcagatgtacaagtttctttattatttaataaaattaataaatctgataatgctctacttaataatgattcaattatatcatttgcatcaatttttaataatgattgtctatgagcagttccaaatgcaacaattaatgacattaaaccttcatttgtcattgctaattttggtaaaacaattttaaatggattatctctataaattgttaaatctgttggtgttaaaattgatgatgttgaatctaagaaaaataaaaatgattcataataatatggtacatttaatagcatatcaggtaatggtaagtagacctcttggtattgattctaatatttccgttacagatgaggttgtagatgtaattgattgttgattatatggttctattatggaattattgaactcttcttcttcttcgtcatcatcatcaatatgactgcgccttttacttgattcatttatcattgggatagaatgtatattatttgaagaatctagtaaattttgtattttactcaaatcaaatgcaaaatcatttaacttataatcatctaatggtaattcaggttgattttcaaataataaagattcattctgtgttgtaaggatatttgtattattatttacattattatttacattagttccatcaaataaattatcatttgagaaatttgtagtagttcaatccttcaaataatgaccaaggagcaggagatgataatttttcatcaaagaaactaccaagtatattgttaacagtttgtaaattatttgatatatcatttattggatttattgctaattctgggtctaatgaagggtaagttgatattatgtttgtgtgtgtatttgagtttgagtctatatttctgtctataattgtatctatatcatcattttccttcttaattattattggatcattaaatttaactttatctattatattattaggtgtattgttattattattactgttattactattattactattattatcagtattttgttcgttaataaaagtaaatgattggttctgtgattttttatttttatttttttttgaaagttttattaggttgttcagattatcatttggatctaaagttggttctattatagtttttatctttttagaattggatttctttttagttggaatagtactagtactgtcagtaccagtactactgttagtactattagattcaaataattgttgtcttgataaagaagctaaaggatttagtttttcaattttaggatttttatagggtctaccaccccaagttaatttaattgaataatcacaagatttatttgccttaatacaattcatacatgaaggacgtaattcatcacatttaattttagatttcctgcatattgaacaaccatttctgcttcttgaagttttagttgtatttgtagatttatttgattttagaggcatgttaattttttttaactcatttacactttatagttgatgttttatgatgttttatgatggatattagtacatttacaggtagatctatcaataaaaagttaataaaaatttaaaaatttaaaactatatgctatctttactcagataatcaatattcatgtcgcccaaaacggcattaccccattaggaaggtgcaagcggtggcatattcattgtaacattacgtaatgcattgttacattgtactataataataatatagtattgacttctatactactattactctcttgaaagataccaactgtctcataattaactgtccgtatatacacaatactcttcaccgttactttattctatagcagtatcgtgatatatcctaatagcaaatagagaaaagaataaacatcgtagcatagcgtgatgccaagcggctattaacaaattctctcttttcttttactaattttttatttcgcaacttccattgacatcaattaatatataatttttttcttttagtttttaaggtacgtatatagccataaatatttagtaggatagtatatttcttgtagaatatcttatagaataatctcatagaatacactgattcaccatgtcgcagtcctctaacaacacgggtgaattgaatagatcatcctctgctttaagaaatagaggtattaatcccggtgttcaagctaaattattagcctttcaagcaaagagacaacaaatgcaacaatcaaagaataatgttaatgataatagtaataataatgatgataataataataatgataataataataatgaaagtaatttaaaagattctgtaccttcattaaagactactaaattaccattggaattcagatgatgaagatttaatgaatttatctcctcttgtatcaaaattaaataataataataataataataataatcaatcatcaaatactaataccaataccaataataaatctccttcaacccctcttagtgttgtatctagtactttcagttctcctgttgtatctcctgatgatgataagggaggtttatcaagaagaacttctttcagattatcaaatactacaagtaatgaagatgactcaataatgagaagaactagctttagaattaataatagtaaagttaataacaataataataataatactcctgatgatataatagacaaacataagattgaaattgatacaacaactattgatcaatctgtcacaaatactaataaattgaatacaccaataaatacatctgcacctttatatccacttaataaaagtgtaagtttccttaatagattacagaaaaatcattctccaagttcaaattcaagttcagattctttatcagtcaaatcctactttatcaaatacttctctccctaaattaccaaaattaccaagtttaccaagcttaccaggtttaccaaaattaccgataggagatgacaatgttggtaatagtgataataataataatattatattaaagactcagatgataatcaaacaagtattgaaagtagtccaataactcctaatttctgcacctccatttttaaataatagacttaattcatcaactccaacaaataattctccatcaactcctaaaaagaaactatcactttctcaaagaagaggtatgaaactgaattttaatgcactggatagttctagtagtatagattcctccaaacaagaaattccaactactactaaacctataataaataataataataatagtactagtagtagcagtacactcactaatcaaatgagtagaatgtcattaaattctaatcgatcgaatatgaataaattaagagataattcaagttccctctcagctagaagaaatccaatgaaaatgagtttagatagtttatcaaatagaccacaaccaatacctaatagaaataatgatacaaattcaagtattcaaagtattcaaagtaatgcaagtactcaaagtaattttagtactaattcatttcaatcatatgcaaaatatattgatattaaatcaggttcattaaattttgcaggtaaagcatcattacattcaaaaggtattgattttacaaatggttcatcatttagaatttcaatggatgatttagaaattttagaagaattaggtcatggtaattatggtgttgtttcgaaagttttacataaaccaactaatattataatggcaatgaaagaagttagattagaattagatgattcaaaatttagacaaattttaatggaattagaagttttacataattgttcatcagattgtattgttgaattttatggtgcatttttcgttgaaggtgcagtttatatgtgtatggaatttatgaaaggtggttcattagataaaatttatggtaatggaattaatgaaattgcattagcttatataactaaaagagttgtaacaggtttaagagaattaaaggataatcataatataattcatagagatgttaaaccaactaatatgttagttaatgaacttggtaaagttaaattatgtgattttggtgttagtggtaatttagttgcatcattagctagaactaatattggatgtcaaagttatatggcacctgaaagaattaaacattcaaatcctgatgtttcaacttattctgttcaatctgatatttggtcattaggtttatcaattttagaaatttctaaaggttgttatccttatccacctgaaacttataataatgttttctcacaattaagtgcaattgttgatggtgaaccacctgaattaccaaaggataaattttcaattgatgcacaagattttgttaaaaaatgtttaaataaaaatccaatgaaacgtccaacttataatcaattattattacacccttggttatcattatataatgattatcaaggtgaagaaatactgtcaaaaattgttaaagaacaatctgaaaataaagataaaaaattagaaaatgaaaataccaataaacctccattacatagtggattacaattacaatcataataagttttatatatatatcactctacgaactctctctttctatatactatatattctatataccactcatttaataattataaagtattacaaagtattataaagtattatataaaataatcctataaaaaacatgttgaagcacagagtcaaaaaaacatagaattattgacttctaccagtgctaaaaccagagtcaaattactgcccccgctctttttgacttctgcaaaacccctcgggggtcttcgttcccgacaaggaaaaattcaaattcatctctggtaacatgaatatttttatttgcaatattttttaatggatttgattttattttatttgaatctgaatttcctttcaagaagaaaatgttcgtatctagtacaagaagtataaagttcatttcaagtaaatcgtttagtacaagtactaaattattaaattcattaaatacttcaataaatagagatgatagcaatcataattctgaaccacaagttataacacgtcgaagaaaagtaactagattttccgatgatttaaataagggaccatcattcgatgattttataagtggacgtgctaaagatatgcttattgatccgttagaggcagcacgtaaagatcctaatgcaagattaccaaaatggttaaaagttccaattccaaagggtaaatcatttcatcaagttaaaaatgatgttaaagaattaaaattagcaactgtttgtgaagaggcaaaatgtccaaatattggtgaatgttggggtggtaaaaaagagtgaagcaactgcaactattatgttaatgggtgatacatgtacaagaggttgtagattttgtagtgttaaaacaaatagaaaacctgctgcattagatccaatggaaccaataaatactgctgaagcaatttcaagatgggggttaggttatgttgtcttaacaactgttgatagagatgatttacctgatggtggtgcagctcatttaagtgaatctgtaaagcaaattaaggaaaaatctccaaatacattaattgaagttttgagtggtgattttagaggtgatttaaatagtgttcaaacattagctaatagtccattagatgtttttgctcataatgttgaaactgttgaagatttaacacctcatgttcgtgatagaagagcaacttatagacaatcattaaaagttttagaaaatgcaaaattaaataataatcatattttaactaaaacttcaattatgttaggttttggtgaatctgacgaacaaattatgcaaactttaaaagatttaagaaatattaatgttgatgttgtaacatttggtcaatatatgagaccaactaaaagacatatgaaagttgttgaatatgttacacctgaaaaattcgattacttggagagatgttgcgcttgatttaggtttcctttattgtgcatctggtccattagttagatcttcttataaagccggtgaagcatatattgaaaatgttattagaaagagaaagagaaatgttggtgtttcaagagaaatcgaaattggtgatgaagaatttatatcaaaggatattttacaaaaggctagtaataaataagtaattcattcattcattatattatatttttatcatttcacttgtcttgtttatagattataaattacatttctaattttgatacctagaatttgtcatttatttcaaattattattattattcataattttactatcttttctagatctacaatcattaattgttcatattgtgtatttttttttaatttttcgttttttttatataaagaactattaacaagttaataagtacatagagttaaaatatattattattatattatcatatttaagcttcttcagttgcttcttcggtcgcttcttcagtttcttcttgaggtgcagctttctttgcttcagctctttccttttcttttgctaattcttcaagaattttctttcctaattcttcaactttttccttaagagcagcaactttcttttcatttgcctttttagtttcttcaaattttaatgcatctgccttcttttcagcttcaagtttttcctttaatgtttcaatagtttcaggatatttatcttctgattcaggaattgaaacattaagtaaacttaattgagtaacaagtgcagaattaacacctttattagctttcttattctttttaccctttttaccctttggtgcagttgcagagaaaaattcttccttttctttcttaataatttctgcattttcaggtaatttaatttcttcaacttttttattatcaacagatgatgaattctttaatgaaagtggagaagatttgttttcatcttcaaattggaattttggatctaataataaaatagttctcttgatattttcaacttgttcacttgaatctgaaacatttgaaaatttttcaagatcttcaatttcttgaagtaaatcttttctttctaatgataattcataagctttttcatcttcttgtctcttcttacgttcattatccatatcttgcttaaatttcttaaatttagcatcaaaatcatctctaatttttctaatttgttttaataattcaaatttttcattattaagagcttttctcttgttataaatttcatctcttttcttataaattgcatcatttttactagttatttcagctaaatctttagtaatttgttcaaattttgcttgagcttccttatttgaaacagatgataatgaagatcttaaatctgcaatctttgccttatcagcatcaattgatttttgaatttcttcgatacctgcaaaatctttctttaatttatttaaagcagtaatttcctttaatgctttcttttcttcaactaacattaaagaacctgattcaatttcattttctaatttcttaattttcttttcaatatcttcaacatttttaaaattatatttagaagtttttgaagtaatttcagcaattttctttttaataatttgatcagttgatctaatttgttcattaattgattgttttttatccttaatttcattttgtgattgaataacacttcttaattcagtggttaattcttgacgttttgcagtatcttcctttgaagcagtagttgattcaaattgagatgtaagtaaagtaatttgtgattcaattttcttaatttgatcatttaaagttgcaatttgtttattctttgcaccaacatctggttgtttaatgaattttctagcctttggagcttcaatttctggaatttcaatagacatactaatgattgttgtttattgatcaaaagagattaaagaaagaaagaaagataataagaaaaatgaaaatagaaaagaaacaataacctgtacggactctattaaatctccatttttcgtcgaacagatcgaatttgacaaatttcgaagaaattaatcgttttctcacttaactgttggaatttaaattttaattttgatattacgtgttctgaaccgtttaaaattttgaaaaaaatgaatagctaaaaaacaagcccgaggccgggtttgaaccagcgaccaacagatttgcaatctgctgctctaccactgagctactcgtgcatgtatagaaatgtttaaaggttaggattttcttgaaattgatattttatgtcacgtgacttggacacttacaaaaaggctgcatttctctacttttgtagtattgttgggtgcttttgaaggtttaattatgatgaaaaaagtttcaaggctgtatcttttttttacatgtattaattaataaaaaactttagacaatatttttcaccattttctacagtttttcacatgttagcttttaaagttaaatttttcaatattcactccgcatatttcatttaaaactttttttttataaatttaattgattaaatttaaacggcgagctgctaccaattattcatctaatattccatacaaaaagcgagtaactatcctcatttatatacatcaatctctcaaaaaagctagatcgcaaacatcaaagagacctattagtgtcaatgtcatttggaacaaaaactctcagtacacatagaaagagatgtagataaaaaaggtatgaaatcatcgggattatagttatatcaacgattccaggtactcttatcaggcgcggctgttaccactatatttttttgacgtttcttctctgcgaagctattaagtcaagtcccaattgtttgactattgataagctatcccacaatttctgtcaggtttgacagaaaaaataattattatttataaagctacttaaattgaatgttttcaatgttacttctttatttaaacttttattcttcctttcataacataactaacagacaatggcagaccagcaatcaggttcttcaacttcagctttcgtctcatctttaatatttaacttgattatatttgcaatctttatatctattttcatattcttaagaaataaatatacaaatgtttacagaccaagaacacttaataaaacattaccagaccatttaaaagctccaccactttcagattcaacttttggttggttaccggacttgatgaccagaccaactaaattcgttattgaacaaactggtattgatggttattttttcctcaggtatttattgctttgggctaatgttggatttttctgtggtttaattttatggcctattttattcgcaattaacgctaccggtggtggcggtcaaagtggttttaatatcatttcttatgctaataatactcataaatggagagtttttgcaaatttgtttttatcatggtttttctttggttttgttgtatataccatttatgttgaattagtttattacactggattcagacataatttacaatgcactcaattttatagcagtttaccaagttctaaagttttacttattgataatgttgatgaaggtttactttttgaagattcattaagaaaattattcccagctgctcaaaagattgttatctcaagagatacaaaggaagcacaagaaatttggaaaaaaagaaataaattaattaataaacttgaaggtgctttcactaaagttatcaacaaatgtttgaagaagagaagcaaaattgaaaaacaaattgaaaagggaaaggaaggttatgaacttccaacaactgagggtcaaattacaagttatatggacgaaaaaaaattaccatcatataaatataaaccaattattggtaagtctaagaaagttttcaatgaaggtattgatgagatgaatgagttcaacactaaattaaacgttgaacaaactaaaattaaagaatctccagaaactttggataaacttggatctgtatttttagaattttcttctcacttggaactacaaagagcttatcaagcagttggatattctgaacattttaaaacatcaagaagatatcaaagttttttacctgaagaagtcatctggaaaaatgttgatattggctttgttgctagaaagtcaaaaagatcaggtgctattacatttttgactttaatgatcatcttttgggcaattccagttgctgttgttggttgtatttcaaatatcaattatttaactgaaaaagttcatttcttaagatttattgataacatgccatcagttttaatgggtattattactggtattttaccatctgttttattatcaattttaatgtcattggtaccacctattattagatggatgggtaaaattggaggtatcttaactttacaacaattagatttttggactcaacaatggttttttggattccaagttattcaagtgtttttagtcacaacatgtacttctgcagcatcatcagttgttacttcaattattaataatccttcaagtgcattggaaatgttatcaaataatttacctccagcttctaatttctacatttcttatatgttacttcaaggtttatcaattagttctggtatcttagctcaaattgttggcttaattttatcttttattattggtagattgtttgataaaacaccaagacaaaaatggaatagagatgtttctttaggatctccatcttggggtacattatatggtacttttggtttattcactgttattatgttatgttatgcaattattgcacctattattattgcttttacttcaattgcattcttattaatttacattgcacaatattattcatttgtttatgtttctggccatacaactgataatagaggtagaaattatccacttgcattatttgaagtttttgttggtgtataccttggtgaaatttcattgattgcattgtttgttatgcaaaagaattgggcttgtgttgttcttcgaagctgtttggcttggattaactgttcttgcacatttatatttcagatatttatttgaaccagtcttagatactgttcctatcggtgcaattgaaggtaattatccatcagaagattttggtaaaatggcaaatcaagaatgttggtgaagattattttgtttctgatgaaagtggtggtgactttaaacaacatcaatcaagctctgattcattaacaggtaccaataagagtgactataaatcagatagtttcaatggtacattggaaaagaaagcaacattatcaactagatatgatagcaataatggtaatcttaattccaatgcaaatgaaaattatcaatcaccaaatgcaggacttgataataagttagaacattttccagcatttgatcaagttgaagaagatttccaaaagaaacaaaatttgaaaaatcactggttactctaacatggcatctaattttggtagttatattggtggtgattataagaaaggatttaggtatgcaatgacatggttttttagaccaaaggaatttttacaatattctgattatcgtccatacatgcctgatttttggactatgccaatttctaaaagtttaacagaagatgttgtttatcaaccacctgaaataaatgaagaaaaggaaccaattttatggattgcagaagataaattaggattgagtaaacaagttgttcaattatgtaatgaacatggtgttaaatgtgctgatacagatgctaaatataatgaaaaagcaaaagttacagtcacagaagagtcatatcctccaggttatgaatcaacaatcatgtattaggattccgggctctcattatatctttaattttaactgcttacattagtttttgtatttttatggttctttaaggtcttttttttgatattatttaataattaattatttaatttgcttttttatattatacataatattaaatctatctaatagattacaatctagtacaaattagaaaaaaaaaacccatcattaactcattcaacttaatagcttctcatcaaaaaacttcttgctttttcctgaaattcagaacattactacacgtttcagtaaaagcatcgaatgctctaatatcagtgcagctgataccctttttaaacgaaaactaacccagtatttaatgcgttcaatttttttattaacagttaaaatattttaaagttactttaagaaaacattttttccaatattttttcggcatccttcttgtcaaggattccctctaaaagcatgaaatttattatatacttcgattggcatttgaaactcaccgttttcatcataacaattttcgtacaaacttgaaggtcctaaatcatcttcataagtaattatcatcatttgcattgacgttattatcagggttattattttcagaataatatttttttactgcttctctaaaaatatatatcattgaaagagaatattgtacatcgttaactttcttatcgatcatttccattgttaaaggtttaacatcattaattgtcattttccttttcactgaaacaggtaatctcataaatcctggataatctttaccagcaaaatacatcatatcaaaactgaccatcttgaaaattagattttttctgtaaaagattgaataattcttgttcgaagtttctatgaaatggtatatggtgtatcaccatataaccttttgaatctagcatgttttaaatattttggattggagaatttaatgagtgtatgtctgtaaacttcaactttaagaaaatctttattacatgtaactgtagcctgggttatattttaaaatatcataaaaccaatcaacaaaaacttcactataagaaataggtttagagaatcttttcataaaataataatgagttaaaatcaatgattttctctcagcatcaattgaattaatatgagatctaagttcatcatgatacttattaaaatgacaagctaaatcatgaagtgctggatgaagtaaagataattcttcttctgaaagagatgaaacatttccaaatgtatgttcttcaattcccttttcagttattccttttttcaaaatctttaatgattttttcatcaatttcactaagcatatgaggttcaggcaaattggaattctgctccacatttttattgaaattctgcttcacatttttagatagaggagtcaccataacaaatccatcattactttcaacttgatgaaattttgtgtcattgatggttataatattccgtttagaaagaggtaaggatttttcagcatttgaaaccttcgatgaagatttcttacttactttattggaagatttttttggaacaaaaggtgtcataacaacaaacccgtcatcatccttttttttcctaaagcttatttttttatgatatcccatatatgttcactatgtatataattcgttgttttattcaatgattaatgcttaatgattagtgattgatgtttatcattgaagatccattgatctatactttaacgcgttttaatgtaaacgccaaaactatttacgtaatcaaatatttaaaactgtttaaaaaccacccagtcacgtgatgttgcgctttttaaacaaaataaaatagaaaaaataaaaaaggaagaagaagaagaagacgacggatcgaagaagggagaagaagcgagaatgggaatttgaaatttcccatttgaaatttgaaatttgttggcttttcgaagaacgtccatcgattgattgatttatatattgacatttggtcatttcactttaattctaatttactttgggttttttcctttttatttggtttattcctcttttgacatcttcattttaacaatggcttacactactagacaagtcggtgctaaaaacaccttagattacaaggttttcattgaaaaggatggtaaaccaatctctcctttccacgatattcccattatacgcagatgaatcaaagaagatcttaaatatggttgttgaagttccaagatggactaatgctaaattagaaattactaaggaagaaactttaaacccaattattcaagatactaaaaagggtaaattaagatttgttagaaactgtttcccacataaaggttacattcataattatggtgctttcccacaaacttgggaagatccaaatgaagttaacccagaaactaatgctgcaggtgataatgatcctttagatgtttgtgaaattggtgaagctgttgcttatccaggtgaagttaaacaagttaaagttttaggtgttatggctttattagatgaaggtgaaactgattggaaaattattgcaattgatgtcaatgatcctttagcttctaaattagaagatgttgaagatgttgaaaaacatttaccaggtttattaagagctactaatgaatggttcagaatttacaaaattccagatggtaaaccagaaaatgttttcgctttcaatggtgaatgtaagaataagaaatatgctgaagaagttattactgaatgtaatgaatcttggaaaaaattagttgaaggtaaggttgctgataacaaaggtgttgttttagctaacactactttaactgaaacttcatcttatgaaccaaatgttgaaattccagctgctaacccattaccagatgctgaaattgacaagtccgttgataagtggttcttcatctccggttctgcttaaatttttctaaactaattttaaaaaaatatatactgtgtatttatttatttaatctatcaaggtagaatcttatgaccctattaatttcaattttctattttacattgattgaattgcattatgaataaatgattcaattttacaattgtcctttattccatcggtctctactcctccactaacatcaactccacaacaaccttcaacagctaatgcgttaacaacattttcaggattaagccctccagccaataaatatctacctttcatatctttaccaaaagttgctgcatcattccaatcaattaatttaccttcaccaccagcctctgaatctaataatggcaataaaaatttatgtgtagttaatgcattttcaaatcctggtttgttcaatacaaatctaggtattattggtatatttgaactatttacaaattcatcaacattctctgatccatgtaactgtacaatatctaaatttagttccctacttttagcaagaacatcttctaatgattgatttctgaaaacaccaactgcgaaaggtccattttctattatacatttggatactgcttcaaaccattcaggtcctttaatgtccaaacttttcacatgttttagtagttcagtaggatgtttgaatttttgatcccttttttgatcttttttcagcacaaagttgaacaatttctttagctaattcatcatctattgttctagctcttccaggaacaagaatcatacctaataatgatgcaccattttcgaattgcaacttctgcagcttctttagttttaagtccacacactttcactaccttttctgtcattaatttgcttagtttagtagtatttatcagtaaaaattaatgatttagaaaatgaaataatcttagaaatttgagtcaaaaagaagttttgtcgctgattaaataaacgatctgtcatttgtaatttaaaccatcaacattaatctttcttttgtattgccattgataaaaccaacttaacatcataaagctttaacctatgggctttttcgaatcatctggtaacaggaatgaaaaaagatttccaaaaatacaagaaacacgatgattctaaggacaattcaccacctccgcaatatcccggagatacaaaacctcaattaccagagtcaaacggacgaataccaccaccaataccaccaagggactataatacaaaggaggaagctccacaaatgaaaagagttgaggagtcaataccttcagtaaatattgcaaccggtgataatattttccaaaatccaataacgaactacacctcctgtatcatgtatccaaacatcgtcaattcaccctgttccactaccgaaattttacaaacaacaagggtccaatacagaccaacaacttttatggtaatcttttggtagagcaacaaaatcttcctgtttggacacatccttatagtatatggaagtcaacagatgatcaattcagaggtcttggaatttcacacacatcagcatcacaaagagtttatggggatgatccaaatatgaaccccgttaaatatttcttcaatccaggtgggaatatgttcaatgatgttatcagcaggaagagtttcaatccgaaaactttgaattcttagttggtgatttggaaagatttagtgcaggtttgaaatttgcaactaagggaggtgaactgaatgttaagatagttcaaggtatgggatttatcacaggtgtatatgatggaacaatcgtaccaacagtgttgtcaaaggtaggatatcaaaaattacagccaatggaatcattgagtcatggcttgaataaatacatcattacagttatttgataatactcaatggataatatacactaattgtggattaagtcaacagtctgctaattgtttaacgacctcaagcttttaatggacaaaaaataattccaaattgccaaattaccaaatcaagaattcaattaaacattactgatagtgttgccggttcttatgttgttgggtgtgagttagaaggcgaattatcatatgacaattcttcatgtgattatagttttcagttatgacattagcggacaatctagccaccggaaaggttctacaatgggtattaccacatcatgtagaatcaatgcatcaatcaatgattggagatttagctgaaaacatgaatttagattctacatgtaaaggtcatatgactgcatttataacaaaacaatttacaatggttgaaaagttacaacctcaagatttagtgcttgatccatggtcagataagaatggtgtttctggatattctgagaactccaagatgaaaataagggaaattgcacaaattgaaatcaatagctttgatgtaattaacgaatccaataccgattccatgtatacagcaggtaaaatattagataagggtgcatttatgctttatgttgccgcatatgttattaaggatgccaatttaacaaatattatgttggaaaaaatgaaaactgcattccaaaggtttattgataataaacaacaagcacctctatgttatgataacaattggaaaggaatagtttccacttcagggttacaagacggtaatttttactgcgattttggtaattgcttttacaatgatcatcatttccattacgggtatcatatacacgcagctgcattggttgcattagctgatcagcattatggtgatggaagatggatgaataatgcgaagccatggattgaaacattaatacgtgatgtttgtaatccatcaaagaaagacacttactttccagtgtttaggtcatttgattttttcaatggtccatagttttgcaaatggattgtttgcacatggcgacggtaaagatgaagaaagttcaagtgaagattatcatgcttattatggtattaaactctggggattggtatcaaataataaatcacttgtatctattgcttccttgaattttatcaattgagaaaagagcaatgaatatgtacatgctttacaaaagtgataatactattatgccttcaaattttatccggaataaagtatcaggtatattatttgaaaataaaattgatcacgctacatattttggaatgaacaaagagttcatacatggaatacacatgattccaataacaccaatgtcaaattatattagagacaccgagtttgttactcaagaatggaatgaaatggcattaggacaacttgcaaactctatagacggaggttggaaagggcttttaatgctcaattctgcaatgtataatccacaaaaagcatgggaattttttagccaaccaaattttcagatgtcttggttggataacggaatgtcccgtacttggtcactagcatactgtgctggaatgggtggatgttgatatataccgtttgtaattcattcatactatttaatatagtagtttggatgacgagcctccataaaatttagtgcaccatgaattattttttcaaattcgtttctacggggcgaaaccttttttcttccaaatcttttgcccttgtagtgtaaaatcctttccttgattccgttagaacttttaaaatatacatttagtaaagtcaattcatcagtttagtaacttatacagcacaatcagcattctagttaacaattcattgatttcattgacgaaaacaaagtttttttttcactttattgaattttttaacaagatattcacgtagaaaagatgagttctccaattccagaattcagctttgctaaaccaaaacctaggagaccaatcaatttaggtacaagttctagttttgattcctcaaatttttcagaaacaatttcaaaaaattctccattacctacatacaacaaaggaattgaatagacttcaagcctacggattagatataatcaactgacgatgatgaagctatgaaattattaactgatgaaaaatcacccttttatgcaactaacaaagcaagaaagttgaagcataaagccttactgccatataaaacatgaaacaattagagatcaatataaatacttaagtcatatcattgcacatatctatatcgctgttaaaagtttagatttgaaaggtaatttaacaattagtagttgaagatttagagtctgcaagaaatagttattttaaataatcaagatcaaaatgcttatattaattctaactctacaatggatggtcaaaagtttgaaacattacacagcaacgaaagtgaagcaatagaagatgatgataatgaagaagatagtgattactatgaaagttcagaagatgaagatgacgaagatgcagcaaattcctaccccaattatgaaaattgaaaaagagtcagcatctataattgcattgaaatattggactaaagaattgaaaaatttattgaaaatgggattagttataccattgcaaatttctattaaattaataaaagttttttacagtatttgtctttcaagaggtcaaacgattgatattttattttatacccaagccatcggtttactttcacgtgaaaagaaattattaattaaaaatggcttagaattggattgggaaccagtttatgaagagtttgcatccacattaggcaatccaactgtttttggcccaagtatgagagatggaagattcaaaaagttaatctcatttgctttgactgtcaaaccattctttaatcaagattctgctcctttgattatggaaaaaattattttgaaatgtactcccccaaccatttcagcaactttaacacattttacagttctgcttccaatgagttttaaacaaccagttaaagaatcggatggttcagtttcttatgacaaaaaggatatccgttattatttaccagttttgtttgatctttgggttaactacaaatctgataaagaaatcaactgtttattaaccgttattatgaatattgcagttgaaaacttaaaaaagggtgctagtgataatttaattttgaacagagggatttatggtatctttaccaaagaacaatttgcttacatgatgaatcaattgtttctttcatcccaaattcgccacaaggataatagaatgattaagtattgtaaattgatttgtcagataatcatcaattcattgagtactgaatatgcttttgaaaaagagggtgttttagacttttttaagacatatgcggatgcagtgtatacgatgatacatccatcaaacagtggtccttggtctagtgttttgtcagaggtggtcaaaaaaattgccttaagcttacatctgagggttcaaggtgagaaagataacagagatttgattccattatatcatccagattataggggattacctgaaggtcaaaaacttaatcaaactgttatcaaagaggtaggttaaagtgttattacccttgattcacttaggtgcacaatccaaatcatcatctcatagaagaaattataacgaagctcttcaagttttatgttttcatggagccaaatatggttctagacaacttacttacagattggtatgcttcttttgaatcaatcaattctacacacagaatcccctattgttattaatcaattaacacatttagcaagattgatggtcgagctacctgtctatagagttcatattccaaggttactttctatgttacttccagctatcgattctaatgatccagaaaaaacaattttggctacagatttcattaccattgtttccagtgttattccctttgctgatttaaccgaaggtttaggtgatggcggagttgctgcagttgatttcacttcccaacatttggcatacttaggatgcaaaattttataaaaagtcaccagttaacatacaatttggagaacaacagattccagatgaatttcaatatgaagctgaatttgaattgattgctttaaaatcagcaacttcttcatttaaagaatttttaacacaattctgtgacaattgcttcaagtttttggaattgggtccagctattgataccaacaataccattgagtctcaagcttgtgcattaatttcatattgttttgagagtttagtggaagcgacaagtgaagagctttacaatgttatttctgataaattttttgagtatgttactaataatgtcaagcatgaagttgctctggtattttgtaacattgctgaagccattgtgagaagagatcctaaaccacaattgaagagaattatggatttttttatgccccatatcattaatgaaattgagcatggtgccggtatttcaagatcacaagaagttttacataaagatcagagattaatttggaatatgagaattgtctcaggtgcaatttctggtgcttctgaagaaattctaccatatttaccatgatctggaaaaattcttgattttacatacttataaattgaaaggaactgctggtttatgcgctgcaatgattgcaaattgtacattatctacaatctcatatttgaaaccagttgaaaaaagaattatctccgataaatggcttgaggatcatggtggtaaatattctgaagaatgttggggtggtttccaattttctgatactagatttgatctggagtatttgaattataaatggtatgtccctacaaatgttgaagttgacgctgcagcggaacattttgagaatctttcatcatcatcaatggagtacatcaatggtattgttgataagttaaatgattctataaagttaagtttagatgaggtcgatcaactaagtttccatgttgaattacttgaaggacttttgaaaggggtttgttgtctttttgaccaatcttacaatgaaaatttagaaagcaagcatttacaaaaatttaaacctttacttgctaatgataatggaattttagtcctcaccatctttggtcaatatagctaaatctgattctatttcatcgttgaatattgaggttttgaaaaataacagtaaaaatgtttctgacgaaggtgaaaagttaatcaataattctaagttgaacggcaagaattacgaaaaagatgatgactttttgatggaagatgaaactatcagatattaatccctatcaacagggagattgaaattgaaataaagagaagtaattctccttctggtgggtcaatttttagcaatgagtcagaaattccaactagatcagcaacacctaatttatctgaatcaattgatgcggtcgatccaactctcaccaaaagagcagatattttattttcttatggtccatatttttcaaatgatatttcaaaggctcttgatttttccttacaaaaagttacattccactagacaaaatgattggtaattcattacacaatttgattaacgcactttctaatagtgaaggttatgttgaattgattggtaaagttattcaatgtatcagtacatggttgaatgattgtggttattacagtaatgacaactgaattatatactgacaacctgcacttcatctccatgcaagactttcctggtgtttttcgctccatacacaagatcagttctaggttcctagactggcagtttcccactgtagcagaattagcatttcatgctgtactaggttacctacaaaattggataaagttttaatcaaagatttagtttcacttattgcttcttcatatggtattacagcaactcatgctgcaagtgttttaggaacatctctaaacagggttatgaattgtacaagtgctatttttaatatttttaatgattgggaaaaggctataacgaataaagataaggatgtcttaatcaatatcatgataatgtttgataagaagaaattgagaggtctggtggagaagagctcatcaatgttgccaaaatatgaagaattgttatataaatcagctgcattgaatgaagatgaagttactatcatgagtatgagattatttaggtctattaagaaatatgttaagattccagcagcggtttgcatttttgatgagaagttgattgaatgtatcagaccaccagatgctgatgttgatatgaaaatttctgttcttaaattagctaaatccagaaagaaagctatgttacttaagattttatctaatttagttaacagttctattgattatctttcaaagaaactgaattggaagtttatgttgctgattttagaattaattactacaatacaatctcatattgaaattccactcgaacagaaaacattatcaaccatgttaaaagtttgttaatggatcacatccagaaatttctaaaaagggtatgttttggattgcctctatttttgatactgttgaatcaagagcctacaacaattatgatcttgataatatgctctcagtgaaccaatttgatccttgtattgttccatttaatagtgttgcaaaagaaaatactgcagaagaattttttaaagaggttaaagatacaaaaaatcccaaattcttcattgataataagcaatggataccatcttatccgtgggataaaaatttagagaattgttgtcccaatcaatagaacaggatttaattttaataataatgatgaacttgctattagggaattttcatcttatatcaccaaagattggttgttggaattattgaaaactcatattgatgaatctgaagcaacatctgcatttttcccaggaattgtttacttttttacttccataacatcactgataatatatggatatgtcgataatctgacattgaaagatttatttgacctgactgatgaaatattttaagggtgatgaaagacctacacatgttgccattagtgaagttttttgtggtgttttatttgcatgtaagaatgataaagaatcaatgaaattagttgacgaagaaatatctaaaagattaaccactatttttgacaaacatttatcccaatcaacttttaaaatgtggtccatattttcatggtggctatctggtcattttgatattagaagaacccctaaaattctttcacttatctgtgattttgaagttcatagagattacaaaggttcaccatttggtttgatgtgtcgtttatcatttttgaagagttacattggttctgtaacaaatagattccacgattttgatcatataactcataagctgtttaaaattttaggtcatccatatgatataatttcttctgaggtttcagctattttatttgatattttacatagtcaaactgttgattatattgatagttttgaagaatacatgagaagaattcacgaagacaaaacaggaatgggatcaattacgagaaaacaaaatgttttattccatgaacactttaaacactttttgctgaaaacaataactttggctaaagataacgatggaaaattaccacaagatgttgttgagtccgaatttatgttccatatcaagggtgcaaatggattattattaagaattttgaggactactataaatgttgaaattgttgattatattcgtcaatatattttacctcttgtttcagaattagataaagttaaggaagcttgtaacttatcaaatattagtattgatacctttttccttgttctgggtagtattagatttgaagaacaagataatgatacaattattgaattattagaaagcaatatgggatggtcatcaccaaatcttactcaatataaacactcattagcattttttggtgtatatggtactgttagctttttggaaagaactccagcacaacgtaagaagctgatggaaattacatgctctatgttatttaatgaacatctgtacttaagagaacaatatagtcaaaatatcaaattgtttgttcatttattcctggattcagaacgtgaagagatgattaagttttgcatcaaaaagtttaagagaattattaaaaagaataagaataataaaaatgttaaattaacggttgaacaaaataatcttgttcatggtgcaacattgggtctttgtgcattagttgaaacatatccatacacaactccaccacctgaatggttacctgaagttttaacaattcttgaagtcaaatgtaccgggtatagtggagctattggtagagctgccaaggatgccttgagtcaatttaagaagacaagacaagatacatggcatattgattctaaatttttcaccgaagaacaattagaagatttagaaggtgtcttatataaatcttactatttgtaattacaattttgtatttcttaaaacatggtttaatttatttttatagtagtttttctcccaaggaataataagttttgaatttttatacagttatatattaagtacactaaagtatttaaatgatatcaaaacgatagaccttctaaagttttagataattttgcagcaccatcagaagatgatgttaaagattctcctataatcattttcggtctatttgcctctaaaccttgtaataggatacaagctttacaaattttattcatagataaataaccacaacgttcacaacgattaccatctttaacaatcgatactgaaccatcaggtcttatttcaatttctttatctgtgttattattattattataattatttattattattattggtattttgtggtatatttttctttggagtatttgtacgtattcttttaggttttaatttaaaatgaccaccactatgaataatatctataatacaagaaggtctaacagattctaaatttttcaataagactctagcggtacctctaaaagcttcaggtgcataagtacattcagtactaaaataatcaagttttttataatgagcatataagacaatttccttttgataagtatatttaaaaggttttgaacgtttaactggtgaaccaattgaattagttgtaacattaactgaactttcaattctagccgcatcacctcttaaaaggttcattaaaacagtttcagccatatcatcagcattatgacctgttacaacatgatgaatatctaattttattgcacctctatccaatgcttgtcttcttaaaacaccacaataagtacaacttgatttaacaccagtacaagagaacaatttcatccattgtccaattatataaatctttataagaaacaatttctaatggcatttgatattgttgttgatttcttttaacagttgctaaactatcatctctataaccaacaataccttcatcaactgataataaaactaaatttaaaccataattatatctttcatttaaagttttcataatagatgctaaaactgtcgaatctttaccaccagatgcaccaatagctattgtttcacccttatagaaaagtttttcctttataattgttaaatgaatttcagtttcaaatacatgatagaaacattctttacaaagtttttgtaagtttttaggtcttttcatgacagctttcctgcaatgacatagttgacatagttgccccaccttaacttccttctttctaagtagtattttccattggatactgtctaaataatgaacaatcaagtgctccaatctactcttcagaaaaagaaattaataagaaataattttttttccaaatccgggagaaagtgaaaaattagaaaaattgagaaatgaaaaaatttcattacgtaatgcgtagtgaaagattttgacgagcccccttttcttttgattacgtgtcccattaacaattgatgagttttcgatgaatggagttaagattgtatataattgttaatgttatttcattttcttttttttttaattttggattaattcttggatttatatcagttttctattgttctcgtttcagacaattgttaacagtaatgcattttgtagctttatggtctttactttgtctatctgttgcttgggcaagtaatataattattgctaatgataaaaattttgatgatattgttttaaattctgataaaacttcatttgttaaattttcagctgaatggtgttcccactgtaaaaaaatggcccctgaatgggaaaaattagcagattcttatgttgatgttgaagatattcaaattgttgaaattgatgcagataaatcaagaagtattggtaaaagatataatattgcttcattcccaacaattaaattattcagagcctgattcattaagtgatccaattgattattcaggtcaaagagaatttgaatttttttcaaattatttacttaatcaagttggtattaagggtaaaaaagttggtaaaccttcaaaagttgttcaaattcatgatggtaatattgaaaaattaattgaaaataaggaaagagctgctttaattgttttcactaaagaaaataattgtgatgattgtatatctgtcaaaaaaatgttcgatcaagtatctcatgctttcataaagaattagataaaattattattgctgaagctcaaaaaaatggtgatgaaccaactgattggattagagatatgtattcaattaatgaattcccaactattgtttatgttgaaactggtgattcatctaaatttgaaatttattcaggttctttaacaagttctgatttaattcaattcattaataataaaattggtacaaagagagctgctaatggtttattagataataaagcaggtattatacctgatatggaagaatcattgaagaaatttattggtattaatattgttgatagaagagaatatgttcaaacttttattgaaaatttgaaaaaagttgatgatcactgttttcaaaaatgaagttaaatattatgcattaattgttaatcaatttattgcaggtaataatggttatgttgatgcagaacttgcaaaatttgatgatatgctaaaaaataaagcaattgatatatcaaccaaggatttagttaatatgaaagttaatttattaaatcatattaaaactttagttactgaagaaacttatagagatgctaaagatgttatggaagacaaggaaaaagctgcagctgctctttccaaagatgaattatagtctaaattttagtatagtctccagtagtatgttataacatttgtaattgaattttttttatagaataatatacacttttcactttatttaatattaaattatataatagtatcctctatacttactaccatttaatggcatcaaattttgaacatgctctaatattatttgggtatactttatgatttaacacagtttcattaattataaaattaacatttaatggagtacatcttgcaaaccatacgaattcaccatgtttattataaattcaaaacattagctgcaaatttatgaccacccacatgattaacaaataaaacactgacacctccatctctatcatcacttgcatctctaaataaatcaagatcctttaattgcgattcaaattcttttttcataattggtgcagttataccacatttcttatcccttgtcttatgtgaacataataaaattattgattgattaatatctttaaaaacttctaatccttcaacattggataaaacttcaattaacttcttctccttctttacctttgatactttcatcttctttgcttttttcaaatacattttcaattccttcaaatactgtatcaatattatcttttgttatcccacgaatccttacaaaccatggttgtactaacacattaagtttatttaaacttaaacattcaggatccataaaatctaatggttcattagttacattacatgcagcaataatggaatatttattactaatttttgaagctttaccactaattaattttaagattgtaccagattcctcaaaggcatcatgttcccaatctgttttaccagttgcaactaaaaagtgtaaatttgctggtctagctgtctcatataatggtgcatttgcagcatctccacgtaaatcaaagcatgattctttatatttattttgacattcacttgaattacatgaaaattccttttctgaaatttctaaaatatcacctatcttttcagcacttttatcaccaataactatattcttcaaagtactttaaatagttcattttgtaagattctatttgtctattccaccaaacactaaaataaattttctaatcgaaaaataaataaatatcacacgtcaaaaagttgaattcgtcagcgattgattagcccttttataaaattcaacaataaagataaataaaatttaaatttaaatttcttcaatgaggttaattgccgaactgttatctccggaaaggatctttctttacagtaaatccggtttattatcttattatcttgtttatctttgtggcgcatatcattaaaaactataaaaaaacccaaaatacgtatacaataaaaattaaaatgcaaaacagtaaagaaatacactaatcatttgaaataacactcagactttcatcgtcagatgtttcctcacctgaaatataaacataatcattctcaatttcggtttgtgttggtgcttcaggaaataccatagtagaagacattacatcagtagtagacagttgtatcttatctaaatcatcaaataaatgattagaaagtttataatcttgagaatcataattaacaaatgctgatttaaaatctacttcattaagagaccaatctgtaaatctagtaacataaatattatcaaaatgatttttcaactcattggtatgtgatttgttttcagaatcaaaaatacttaaaagtaacttctcatttgactttaaatcaattaatgacttaactttaatttcaagctcgttggcgtcgaaatcaatcatataacaactaattagttgaaatggtgacttttcaacatcatttgaactttcattatcttcttgacctccttcttgacctccttcctgacctccttcctgacctccttcttcgcctatttctttatctttttcttcacctttttcttcacctttttcttcatcaatgatgacatcttgttctttaacagtctctttaactttttccttaacattatcaagatcttcagattgttcatcatgctctacgatcttttcttcaacatcttctggcactttttctgttccatctttaataatttttacaaaagaaccatgtaataagttagatgtcactttctctgtccagtttggtctatacaaaaattcttgaccattatatgcaacatttaaataaaatgtatcaaattcattaatacaatttgtgtaatctttaaagcgaattaaagcatcacatgaatcaaaatgaaacagtttctcaataggttttctgtctgttgtgaaagagatatacactgaaacatcaaatgatttgagatttccattgaatcttatagtcaagtcttcatcatctctgatacttgcataaactctgtcaaactccctctcattctgatgaatttttgaatctttataagggtttctaataacatcattaatattcatcgtctctggtactcctgaaaaagtgaatccctctttgttaacaaaaccacttctatctgaattatcaaagctaaaatttttcttttcgtactgtgttttgtttccccaataaccagtaacttttatatcatcatcagaaattctttctttttgattatctttgttgaaaattccaaaactaaatgctttggtttctgattttgctgtagtattattatctttaacatttgaattatctttaaatggtgagttcattgcaagatttttttctgaaagtagcctatcaaatatactaggttttgcatttgcatttttatccctggatgaccaagtaccgaaagattttgatttatcatctttattcatataactaccgagtttaggtctcagctttcaatgattcattattaaatggactgtacttcgctgtttcatctttattattcagtagccaagtgccaaaagttcttggtttatcttcttcaccttttctagtctcagtattcaaatgctttggtatcaaaatttccacttatagatgaccaagtaccaaaatttttcacactttccttcttttcgccgttatcagtatcgtttttccatccagaaccaaaatcaaatcctttaaaatttgtatctttttccttggtatcattcttccatttagaacctaaactaaattgattgacatcagtatcttttttctcccatgcttcagactgaattgggatttttgttgttattaataaaggatcttcgttattacaaattctcaaaacttgatgagaagaggcatgtttatttgaaacaattttctctgaatcacaagattcacataaatcataatcaaaacattgaacacaatgatatctataaccaataattttaccatcacaaccatcacataatatattagtgtgtaaggttttaatttccgaatttggagtatcagatgataaaaaattcattaaattagctttaatagaattcattttttcacttaatggttccattgatgacttgatctttaaattcattgaaatttgaggatatatcagataatttattatcaaaagtgagatctaatggttcgatatatgattgaatagctttcagtaagaaatccacttgatcgtttacattatcatatgatgatgtagcttcagcgagatagtcaacaaatgggaatacttgaagtatttggtataactaaaggatatttgaaaagaatagattcactttgattaattttaccattaccttcgacttcaacatcaacatccagtttgtttgaatcatctgaagccttttcattattaatattattattatcaatatcattattattatgattaccacttttaaaataaaaattttttaatttatcaacaagtaaatcttcaatttcctcgacatttttcaatttagcaacagttgaagatttaacaaatactaaaactaaagaaattctattcttagcacttaattttgaattgaatgattggaaatgattttctttattaagtaaataaaaactttctttacgatttgattttctaaagaggaaagcatttaattttttcgaattaagataatgcagtatatttctaattgaaatattactcatatcatccttatataatttagtaaagaatctaacaatttgagcaaaaaatttattgaaattgagttttttcaaatcttctctaaattttttaaaggtaacatttgttgcaccaattgaagtacctctaagtaaagttgatgggaaaacatctaaatcaattataacatcatcctttaattttgataaaatagtagaaccagtagtatcaacttctgaattttcacttgatttaaacactaactctggcattgtctatgtttaaaagcaaaaagaatatatcaatcaaataaaatcaggggtgatcagggataataataaattatattaattaaggctcatctcagggcaaaaaagctttaatttttactcactatcgcatgatttgaagttaaaattggggtaattgaggtaataggggtaattgggtaattgcctccttcgacagtcctatcgacctgcactttattttagaaaggagtgaaaatttttatgtaaattaattacattacctaatatagtatacatgttgcctaaataggaataaatgtcgctaattttataaatttcataacatttatgacgtatttaatttaatttagtatgtttacatggttgctattttaatctttcaattaattttgataattcctgatattttgcatttctattttcaactatctttcacttttatttcttatttaatgctttttagactagtcatttctattttacctgctcattatctgcctttctttcctttgtatccttcaatacctccttttattcataatttcttttctccccgtttcttttaaataattcctgatctcccctttattccttcttttcaaatcttttatattctttctgtaaatatattactaattattataattatttttaatctcttatttcatctaaataaataacagatatagagatgaaatgctcaaaaactcatataactacaacacttataacttcatttgcattattaacaaatgcaattgatttagaaattggtaataaagattctgtttgtaatgcagcaactgatattacaaatggtataatggattattatttaggtattagagaaaatggtacaattggtatgtttcaacaaccttattattggtgggaatcgggtttagtatttggtggtatgattgatacttggaaattttgtaataatgatacttatgtttcaactattcaagatgcgattaatgctcaaaaaggtccaaataatgattttactgatgttacaaatcaatctcatgttgaagcaaatgatgatcaattattttggggttttacagttcatggaagcagctgaaagagatttcccaaataataatgataatgatccttcttatgctcaaatggctttagactgtctataattcaatggctccaagatgggattctgataattgtggtggtggtttaagatggcaaattttaagtaatatgtcaggttgggattataaatcaacaattgcaacttctggtgtttacgcattggctggtagattagctagatatactaaaaatgatgattttatcaaatctgcagacagaattttaagatggatgaaacaatcaatgtttgtttatcaaaaggatgatcaagatttttatacagttaatgatggtgcagaaattgaaaatggtagttgtgctgttgttaatggtgcagtctggtcttataattttgcaacaatgattatgggtactgcttatttatataatacaactaatggtgattctaaatggggtaatgaattagataaatttattggtggtgttgaacattatatgctgaatacaactggtaataatgttttgtttgaatatcaatgtgatcaatggaatagatgtaataatgatcaaagagcttttagagcaattgtggctagagttttaggtaatgttgttcaattagctccaaatactggttatgcttcaagagcaatgaaaattattaatgattctgctgaaggtgcagctcaagcttgttctggtggtactgatggtaaaacttgtggtattaattggggtattgatggttgggatggtatgtatggtttaggtgaacaaattgctgctttagaagttattcaaaatactcttattgaacaagttccagcaccatgtactgaggatacttgtggtgaagatgttgatgatgtgataatatttcaactattcctgttccaacaagtacaagagttttcactgatgttcacactagaactcatgttgaaactgttacaatttcaacaattgatgaagttttctatacaggaaattaatcatataaaagtaattatcaatcactctacatataccatataatatttttacagcattcacagaaaagaaagaaaaaatatcattaataactttcttaaaacattgacatctatacttatatttctaacgtttcaatctctttctatactagtttacttctataccttttatttttacttttttatctaataacttatgcatttatatcatgtaaatttataaattttgtcaatattattattattttatttaattatatcttgtaaaaaaagccccgatcaactccagaaaaacgtgtagtaatacacatatacgccttattcatcagcatcaagtgatgacataataatttttcagaccctcagtttttatgatttgctaaaattagacttctctcgatgctgcactgtgcataatgtttattttcattttcattgctgtttaaactctgttgtttttcttcctctgttgactcaaagttcatttacttgatctagtcttatttgtttctattttacatttgaataattattgattaatgaaacgatcgaatgaacatttaaatatgaaatcaatttttacaattataataactttgtttgtatctttgacaaattgtctggatttagaagttggtgataaagattcagtttgtgatgccgcaactttaataattgagggtattatggattattatgaaggtataagacctggtggtactgttggtatgtttcaagcaccatattattggtgggaagctggggaaatttttggtggtatgattgatacatgggcatggtgtaataatgatacctatgaacaaatgatttatgatgcattaatgcatcaaaaaggttctcaaaataattatattcctgcaaatcaatcaacaactgaaggtaatgatgatcaagcattttggggtttagcagttatagaagcaactgaaagaaattttacaaatcccccaagtgatgaacctggttggttagctttaactcaagctgtctataatacaatgttatcaagatgggatacagcaaattgtggtggtggtttaagatggcaaattttccaatttaattctggttatgattataaaaatacaatttcaaattccgctttgtttgctatagcctgctagattagctagatatacacaaaatgaaacttatgttgaaactgctgaaatggtttgggattggttggttgatgttaaatttatccaagatagttcaaatggttatgctatttatgatggtgcaaatattggtacaaataattgttcaactatacatacacaaacttggagttataattatgctttattattatcaggttcagcatatatttataattttacaggtaatgatacctggcttgaatagattttctgatgtttatacaggtatcgaatcaacttttgtcaactcgtcaacaggtattatttatgaagcaatgtgtcaagaaagtggtaaatgtaataatgatcaacgttcattcaaatctattttttcaagaagtttaggtcaaagtgctcaattgatttcttcttataccgatagaattatggatctgattaatacatctgctaaaggtgcagctgaatcatgttctggtggtagtgatggtcatacttgtggtatcaattggagttatggttcctgggatggttggtatggtttaggtgaacaaatttctgcattagaaattatgcaaaatactttagtaatgcaaaattctccacccttaactaattcaactggtggtacatcaacctggtgatgttaatgctggtttaacatcacgtgaaacttctaataaaaatttaattacagttacttcaaaggataaagcaggtgctggtgttttaactgcaattgttttaataatttttgttggtattagtggttggactataatttagttgcatttatatgcgttttgtatgatatgtacttgttttgttgtattttattctgatttatgttttttgtttgttttatctctctctctctctctctctctctctctctctctctctttatagttacaaatctttactatacaattttttaaaaaaaatgatgatataaataacctagaaaattaaaaatcgggatgatagataaatactacagtattttattattcaggtgtttcgatcaagtatgctaaagctgaaacgccaacaagatcagccaattaaatttttttactatacagatcttcctggacgatccattgagtaaccacttatatacttatcgacatcatcttctcccagatcaatcattgattcaatggatgtaataggaggtaaactttcatctggtccttctctgtatataaatggaactttttcaaatggtatcctcttgactcctattgggaccgcaactaaaggagttgaatcaccattgagttcctttgcaagatccgctaattctaaaattagtgcattatctccattttgatacttttcaattaaagtatctataagttcatttgtttcttgaaccatttcatttcttgtaaaaatggtttctttagtttcttccattttagatgaggaaagtttagaatcgctcattaatgatactaaaggcttgataacagcattatccattccaataatttttttaatttgctccttaaccttctgaattgtcattgttgttcagtgtctttaaaagaagcaagataaaagtggacagagcctccaggatatcgactgatttaactccctcgaataatttagatggctcagctgttatttttcaagttggttctaatttttgtaatagtaatgattctggattgatgatatgatggtgtccaataacaacaccagataactaactgtatcaagcgggtattatgatgtcaacggcacatttaaatgacactttgatatggttatcaaatcacctttcttaatctaaaccatcttcttcaccatcttcttctttttttcttcttctttgacttatcatgaaatttagtcttacaagtttctgaacaaaaccataatcctgttggctcattggtcaatccaacacatttgaaatgaaaccattcgtgtggacatttatcatattcacatgccaccattctaccaaatgatggaccattacagaaacaatatctttcttcaactttattttcaacaactggttgtacaacttcaaccggtggttgtggcggtggtggtggtacctcaactatctcttctttttgtactttctttaccaccatttcagattttgttgttgttgatttcacattcttctcaattttgacaactttatttagtttaactacaggctttttatgcttcaattgagtttttatattagttgttggattctttgtattttgtttcttcaaagtgatttttattttcaaattcgattgattattcatatcattgaatgaatcattaaaaatattcttctctgggtttgcttttctgttttctatgaacttcttcttatattctctccaatcattccaacgactttcaactgcttcacttgtccacccaggtagcttatcacttaataatttgtttaaaacacgatcatcattaagtatatcaagatggttttcaacaattgaaactaaatgtttggattcgcattcggattctaattgatacttcaacataagttgctttgttctgttaacttcctttatattaagaggagtttgtttaagtaatagtgatatcttagcttctaatctagttgttttcaagttcatcatttgaactaaccataaacttctaataatatcacatggtaaatgatctaatgtagagactaagttattattacccgatcgtataaactcaacaatctcatctgatacttgaagaggtacagtgggttccgacattgtatcttttgttgtctgaagatgttgttacttcaatttaaaataaacctacataaatctgaaaaatcatgtagataaaaaacctcgcttacgttattaattctttggaatgtttttcagtagtactactattactactactaattctacggacaattaataataagatataatatattaattaattaatgataataataaatataaatgcatttagtaaatatcatagatatttgaagcatcattataagaagaagaatgagtatgaaattggactttaaaaaaataaattttttcaatgaacaattataaatctaaacaaggtaaaagacaaagtttaaatggtttaaagaatttttcattaaagataacaagaatatatgatgattcgtttcaagaatgtaatgtataattgtaatgttttttttataataatttaatttaataataataataaataagcgtagaaactaaaaggtattaacaaattttaacaatcaactttatttctttggtggatggtaaacaatctttctatgtttgatggtagtccacttgaatttcttaacataaacagaaacgaagtataatgcagtaacaacaataagagcctttgcgcctaatctctttctttcatcatgttcaggttcagaagtccagtttaagaaagttgaaacatctttagccatttgagaagttgtagcaggagtaccatcttcatattcaactaaatcatcgaataaaactctacccatggcaattgaaccacctgggaagtaaggattatagttagcacctacaggtaaagtaacaccagcaggaggttcatctggataaccagttaataatgcaaagatataatcagcagcaccgtgtcttgccttaacgataagggataaatcaggtggtaaagcaccttgatttgcagctcttgcagcttgttcatttgcgtaaggacctggaatataatcagctaatttacctggtctcttctttggattaccttcatcatcaggttcatcatcatattcaaattcttctgccattgcctttgcttcagagttagtatgagatacaccaactaaatttctccaagcaattctatcaagtgaatgacatgcagcacaaacttctctataaacttggaaacctcttctaattgatgcatgatcaaaggtatcaaacataccattatgagaccagttgaattcaggtgggtgaagaccatgttctgcagcagtcattgcttgtgcagtttgagaatcttgatataaaatgaaagcagcggttaaaccagttgcagcaactgcagcattgacaatcttcttagtgtttgaagaaacatcagattttgcagctgttgagaatgatctctgtaataataaaaagtagtggatgttagtattctgtatctagtagttgaattgattaaaagtgtcataatagtgaaataattagccaataagagcgcatgaaaaaaaaatcgcgatggaaaatgctgattgaatgattgattgattagtttgaatgaaagatgttgaaataatgggataagaagggcattaaatgaatgtaatataattgaaaggaaagtgtagactatgtaatgtaaattacttgttggtatcactgttgtataaagttgtatcctgtattgtaaaaaaatcgtctgactattttgttttcataaatttattctaaactaaaagtaattttcaaggaatatggacgtataatgtaatgttggtaaaatactgtagatatataatgattgtattatgaatatagcaattaatttcagtaaaagacacttttaattgattatttactttaatattatatctcataacaaatgaattggaaataaatcaaatgagatatgattaaagagttttggaaaagtataatatacatacagcaccgtgcttaagagcagaaccgaattgggagaacatctttgatgtaggtgaggatactaaaagagaatgaaacaattaaagcagaatccaacagtaaactaaagtaaggtaactattataactgacaaataaaattgttagcaaaaagtgattttccactcactcactgtaagcaaatggaaaaaaatagtgagaaattataaaggctgtagagtgatgctttcatcaattagactggtttatattagtgtatattgatgattattctctactataatcatatacattggaatctatggtatgtgaaataggtatatacataagaaaatatggtgttaatttccaacaggtacagataataacccatttaaaccggtgtaattactgtgtggtcagctattggaagactcttattggctgaaaatttcaattttttaaattttatcaacattatcgtcgcgtctgtgttggtttgctttgtatccgtacaccaatgtggtccataagagacgcgtaagtataacttattatggtaaactttcactttttcaaattatacagacaccaaaagttttaatgattcactacggagttaccattggtaatagacatatcagataactaatagaacaacatgggtaatagtgaagaacaagcatatttggatttagttagaaaaaattatagctgaaggagaattcgtcctgatagaacaggtactggtacttattcattatttgcaccacctcagctccgtttcaacttatctaatggtactttcccacttttaactactaagaaagttttcttaaagggtattttacatgaacttctatggtttataaatggttcaacagatgcatctttattaagtgataaaggtgttaaaatttgggatggtaatggatcaagagaatatttagattcattaggtttaactgatagagaagttggtgatttaggtcctgtttatggatttcaatggcgtcattttggtgctcaatataaggattgtcatacagattatacaaatcaaggttatgatcaattagctcaaattatacatactttaaagactaaatccttatgatcgtaggattattttatcagcttggaatccacctgcttttaaagaaatggcattacctccatgtcatgttttctgtcaatttcatgttaatttcccgaaaaatgaaaaaccaagattaagttgtcaaatgtatcaacgttcctgtgatatggggttaggtgtaccttttaatattgcttcttatgctttattaacttatatgattgcaatggtagttgatatgcaacctggagattttattcatgttatgggtgatgctcatgtttattcaaatcatgttgatgctttaaaggaacaacttacaagaactcctcgtgatttcccaatattgaaactactaagaaatgttacaagtattgatgattttaaattcgaagattttaaagttgaagaatatgatccttatggtccaattaaaatgaaaatggctgtataatgcttagatatcatggtttatatagaaaaattttatagtcaatttaaaataaaattacaattaaaaataatattagtattaattaatatttacagttataaataatctacaatcacaataacatatcaaatgatgaaggttatactatctttcttcctactcccgttaccatatttaccaaacatatccatattttctaaatcaaagattgtctttcctttattattattctcctcatcattcatctattctattaggacgattggtaatattcctcaatatagtattcttactcttcttattaggtttactaaccctattttctttatcttcatcaacatatatcttattacggaacttaccagattctcgtcctatttattattggtaaatcataattaactattaatgatcttcgacgactacgacgtctttcacttgtactttcattaacatcatctaatggatccattccaagccatttcttagtcttttcagtatctaaattctttaactctcttggaatactactctttcttctatttttcttgactggtgatagttattggagatggtgtaggaagattgtgtttgttccattggtattggataatcgggtatttcgtgaacttctggaacttctgggacttctgggacttctgaaacatcatgaaccttcgtgaatttcaggaatatcatgagattcctctatcactggtattttctttcttattattatcattactattattattattattattattctcctctaccttatcttctagtccaaggtatggaatcatagataaatgatcagttttttccattatttgagtaactctttttattggaattaattcagaacttttatccacatattctggctcaagttccatttcaatctccttaacttcatcatcttgttcaatcaatgtctctaatccaccttcgttggatacatcacttaattcaggtgccttaaaataaatacttttacgtctttttaagtcatcattaacattctcccaatatagatcaaattcatatttctccggatcaaactttctcaatttctcttcctcttttgatgatactctggtaatcaacttcattggaatatctttcttttcaacatcaacacctatttctcctacaaatgaacggaattcttcgatcataccttcaaatttatcaactactatatcattgaatctctttgaattaattttcaacaaatccattaactttatcttatcatttttcagttgtaatacttgcttttgtgattgaaacaattgtttctcaagaccatttacttttaattttaattcttcatttttctgtgctaaaattttattttgaatattatatgtccttttaatttcatctatttcggcatcattatgtgatgagctaactactagctgcatttcatttgcatcattattcatcagcgctctcaccatgattctagcaataatatatattctaatctagcaattacgttgtttactcaaagaaaaaagaataatagtaaaaaagaagataaaaaaagtaaacaataaacttcaagttcgaataaacgcgtttgtaaagtgacgaattgttttttttaacaggcaactcacctctacttcttttttctgctttacatgaccaatgtcacaaagatactccattctgaatgaatacgaagcggaatctttgattcatcagcgtcaggaagaacttcgtagactacaatctattgaatcattgacttcacaactatctaaaaccttattgttattaaatgatcaattatcaaaacttcaaattgggacagactcagtatcacaaataacaggtaattggatacaaattgttagagctgttagtttagctgctaattctatatctaatattgatgctaaggatgaaaatccgttgactgaaaggttggttcgttgtgcattggatgaattagggacaattgtaaaacaattagataaataaggttggaatttagttttacctccaaaattatatgaatctaataataaatgatataggcagtcaaattgtatgatgcttctaaaaagaggactttatctatttacagctaaattataggtttcatggttcatattctgctgtttagttattcaagttcattataacaaatcatatcaacatgtacacctttgtgttgaagagtatttgttgagtatacacaaacgtttaccaaataataagactaaaaatggaaagattaataatatcttgttcatttatagctacacttgattaattaatacctctaaactgtaacagtttatgagtccaaattgaactgttttttctagtttgactagacgaagtgttttaatttcgactcataacctgttgtagtctagtttattgcttgatctgggtgtaatttatgtattgtttaggtttttataattatttataacattaatacttctatattcaattaaaagctcactttttaacgttcaatgaactataaggaaagatattgaacgttattgaacgttactgtattacacagtattaagttgggtgaaaattaaatgtttttagaagagcaataaaatttaaaaatttacattttgttttatttattaacagaaaatacctagtattttcaaaaattttgcggtcacgtgaccacaatacaaaaatgtcggaaacaaccacaaaaagttactttcaacaaattccttgttagctcagtcggtagagcgttcggcttttaagaattctttaagaagtcgaccgaaatgtccagggttcgagcccctgataaggagtttaaacatttatttttttaactttctctttttacgtgtttttcactggtttttttacattactgtcattatgcaattaggtattttgttagctttaaagtcaaattatttattactttcagaaaagattgttgttctaacagataatcaagcattggtcagtatatcaaaagaaaaaaattcattgctcaaccctagaatactttagaaactttgtcaacttatccgatcgcataatataatgtgtcctcctcttcttaatggtaataaaataggtgttacaactcaatttgggaattacaaattcatgaaactaccattcggtttagctgcttcacctgcgatttttactaactttatgcaatttattttttccaaattgcactatgatgaagaaaatcatttcattcaatgttacattgatgatattattgttgcttctaatgataaagatgctcatgttgaattgttgaccagaattttaaaatttttacaagataatgatcttagattatctgcaaacaaggttaaatgctgtagaaatgaagttgaatttttaggatatttaatcaaagatggaaaaaggtatccagcacccgaaaaggttgaagtgataattgggtcttacctacaagtgcaaatcaatggtcttcgttcatcgtttttgtcaatttcctgaatgcaccaaatttacaaacaagataaaaaaagcttcattagcttcctgaaggccaatttgattcttgaaaaaaacaaaagcttgtcttagactaggaactctgaatttttcacgattgtcaccaacaatcaacaaatctttcaaataattggtaatcattctaccaacacaaaaatctttcttcttggaatgtggaacacaaaacacatacttatttaaacaatcatttgaattatccaaatgagcagcatttttgatatgttttaaactttcatcaaaatcgatttcaacatcattcaaaatatgtgtataatcattaattgatggatccaaacgcaagtctttcatggaatcatgtttcaattgagataatgctaaaacgaagtgaatgaaatacttcgtaacttcatcattaacaataaagacttttttagaataatcagaaacaatatacaaataagccttcccataattaggttgatataatttcataacagtaccattattatccatggtaaaataggccttctcaaacaatttgtaactacagaaaaatgcagcatcatcaactgaaggaagaaattcagagaaagtggtacatcttagttgtttctaaaaccaaattcaaacaatctgattcagtatacatacttaataccctttcaatgaatttccttccttatttataacaactctataaagaaaagtgtgtacaatccaatgtaaaaccattaatcatgcaatccatcacaggaccatttgaaacctcatccaccaacagacgcgacgatctcttaaatgtattttttaaatggctgcataaaaatgaaaaacgaccgctttgctttatcttagcagtgagacattgattaaattgatagtgttaagtttgtagattgtataggttttctttgtactttttctatctagtaaagtaaacttaaagcacatattacaatggtacgtattgaatcttacatattagtttatcaattgataaattaaatattcatttgattttagaactaaaagtcagttttactaacatttttatacttttacttacttttaattactataggcaggtgctatagagaacgcacgtaaatcaattaaaaatcttacaattaatgatgaagatgaatcattatatggtcaaatttattcagtttcaggtccagtcgttattgctgaaaatatgattggttgtgccatgtatgaattagttagagttggtcatggtaatttagttggtgaagttattagaattgatcaagataaagcaactattcaagtttatgaagaaactgctggtgttacagttggtgatccagttttaagaactggtaaaccattatcagttgaattaggtccaggtttaatggaaactatttatgatggtattcaaagacctttaaaggaaattaaagatatgactcaatcaatttatattccaagaggtgttgatactcctgctttatcaagaacaattaaatatgaattcactccaagtagttttcaagtaggtgatcatattactggtggtgatattttcggtacagttttcgaaaattctttattatctgatcataaaatcttattacctccaagagcaagaggtacaattgtttctattgcaagttctggctcttatacaattgatgaaccattacttgaagttgaattcgatggtgtcgtttctaaatattcaatgatgcatacttggcctgttagagttccaagacctgttgcttctaaattatctgcaaattatccattattaaccggtcaaagagttttagatgctcttttcccatgtgttcaaggtggtacaacttgtattcctggagctttcggttgtggtaaaactgttatttctcaatctttatctaaatattctaattctgatattattatttatgttggttgtggtgaacgtggtaatgaaatggcagaagttttgatggaattcccagaattatataccgaaataagtggtaaaaaggaaccaattatgaagagaactactttagttgcaaatacttcaaatatgccagtcgctgcaagagaagcttcaatttatactggtattacattagctgaatatttcagagatcaaggtaaacatgtttctatgattgctgattcttcttcaagatgggcagaagctttaagagaaatttctggtagattgggtgaaatgcctgcagatcaaggtttccctgcttatttaggtgctaaattagcttccttctacgaaagagctggtaaatcagttgctttaggttctcctgatagggaaggttctgtttctattgttgcagctgtttcacctgcaggtggtgatttctcagatcctgttacaacttcaactttaggtattacacaagttttctggggtttagataaaaaattagctcaaagaaaacatttcccatctgttaatacatcaatttcatattcaaaatatacaaatgttttaaataaattctatgatcaaaattatccagaatttgcaactttaagagataaaattagagaaatcttatcaaatgccgaagaattagaacaagttgttcaattagttggtaaatctgctctttcagactccgataaaattgttttagatgtttcaactttaatcaaggaagatttcttacaacaaaatggttattcaacatatgatgcattctgtccaatttggaaaacttatgatatgatgcgtacgtttgtctcatattacgatgaagctcaaaaagctgttacaagtggtgctcaatggtctagattagctgaaaatacatccgatgttaaacatgcagtttcatcagctaaattctttgaaccaagtagaggtcaagaagaagttcatggagaatttgataaattattatcaactatcacagatcgtttccaagaagcatctgaataaataattttaattccttaaagaaactcttactctttcattgtatagaattatattacttgacgtatttagctaaaaaaaataaaaaaatggttataaaaagatttaaagtaaaatgaatttatgggttaaaataaggttgcgcaggggagcccttcgtagaaaaataatggtcttatggatttcctatgtaaacacgtacttttttcattaatcaaatgaactttttggcaaaaactataggtacattaacaggtactgcaattccatattcatttaactgaacctcgtgttcttccaatttgcgaaaattccaagtagcagatcaatttggaaagtttatgatggtgtttcagataaagattcaacacctgtcaccatttttgaatttgatctgaaaaatccagcaaattataattacattacaaatgctaagaatgcattgaagaaacataaagcattatcattattacccggtgttttgactgtttttgaaactattgaaaatgatagaactctttatttaataacagaacgtgcatcatcattagctgaaattacaactgagatatcaccaacttcagctgttctagcaatttatcaaattacaacaggtttgaagtttataaatgtggaaggttcttgccttcatgggaatttaagggatcataatgttttcattactgattctggtgaatggaaaattggtggatttgaatttgcttttaattatcaagataacgctatagaattccctgcattatacgcatcatatcccgccttaacatttcaaaaaggtatgattatttctccagagtttgaatcttttggatcagattgttttagaactcatctaaaagggggtaaatcattgaaatttgattcttatttacttggtttattatcatatcaaatttctcataatagaagtcctgcctctaatgaagttaagacccagtataataattggagttttgagggtattcctataaataaattactctctccaaacgttggactacgaatgactactgaacagtttttaggtaatggtgaaacatcatattttggaacgccagagattgttgcatattccaaattttcacatatttcaattgtaagtttgacagaaaagttagagatttttaaagcattagcaagtgctgatatctctgcaaaattcttggattttaaagttatgccagaactcaaaaatgtctttgatatcacaacttcaaatgaaggaaatattcaaacaattttgttatatttgatgtactttgatttataaaaactcaaatgaagaatctaagtcttttgaaatattctttcaaacctactatatttaaggcatttacattatcagacagagcaattcgtacaatattacttaaaattttaccacatgttattgaaaatataactaaatatgaagttcaagataaaatatatccaaatttggttactgggtttttagatactgatcttacaatccgtactgaaacattattatcaatttcatatgtcatggataaaataacagaaagacagttaaacaatgatcttttacgttatttagccaaattacaagttgacccaaatccaaattaagagctaatacctgttgtatgcttaaataaaatttcattccaaaatgcaatcaagtacacgtattggtgttcttatcactgcctttggtaaagcacttaaagatacagacttatgtcaccagattatgtgcagttcgtggatttgaatcatcaattgaatattttacaccagaaatatgttgttcaaaagttttatcatcattatcacctgcattattagataaatcatcagttatcagagaagaagcagagaaaacatttgaaatatacatgcaaaaaattagagctgaagcagcaagtattaaacataatgaagaagacgatcatattgaagttgacgtttctcatctaagcaatttaatggattctatttcattagagaatcttggaaactctatattagagacagtttctactctcaatacaccttcaggtacaccattcccagaatctcgtatgaatagtaaaaataacttgactagattacaatcagcatcaacagaaaatgttgttaacaaggcatttggtgtaagtgatgattttgatgattttgatggtgatgatggttgggatgtagatgaatgatgaaattgaaaatgctaaaccagtagtttcgaaacaaagcagttttaacaaacctaagtcagcatttggagctactgttcaaaaacaagaaacaaatactattaacaaaccttctacaattaacaagaagtcaatggtattaggcaagaacaaaccagttacgaaaattaacttaaaccttcaacctaaagttgaagacggatgacgatggttggggtgatggttggtaatcatctctataaatcctttttgtacactataagtaaaataaataaacattataagaatatattcataagtctatgctttatctaattgtaatttatcgttagttccacctaattttttcaatcttaagaaaacatcacatccataaccatcaatagtagccatatccaaagtaccattccaataatctgtataaactttacacattggcattgaaataccaagagtatacttcaaagggacgtgaagcaagtgaactaagtgtggaattatctttctcagatcgacttctttccatttcaccaatgtttgctaaaacaccaggtaattcacttggttttaatatctccatttcatttctgtttttgaaatattgatgtgatgtaattggtaatctttcaggtaaatctagatttggtaactgcataaaaattattcaaatgaagttttgcaacttcaggagtcttactaaatgaccaaaccttatccattttttcaaatggcataccacctccttgatcagagaatttgaatgtcatttcatatttagtgttgactatataaacacaaacaggtggtggtttatctgatttcactccaatatttataggatcttgaagtttgatgtattgttcaatagtacgtttcaaagcatttcttaaaatttctgtgaaaatgtagattaaatgatttgtcataaattgaaatttaaaatcatctcctataattttcaattctggcatttcgacatttgggtatatactttgtagaaacgtaatgatacttttgtaatgatttatttagatgttcatgagctgaacaatattggaatgcttcaccaacatagtctggtggttttacttgatcatcatcaaggttttgtagttttttagaatcttcaaatgttttggacatacaaacatgttgatccataataactcttctactaatccttgaacgcaacatggatgacataaatttatctaaatcttcaggtgacatgttttgtaatacagaaacctctaatgcacccatcataagatgtggtagaacaatataatggtcacttaacatgttttctaaaaactcacagaaacctttattatcttctaaagattctatcttttcaactttcctaaaagcatcaaaacaatgataataactttgatacacttgactaatatgataattactcgttatttcatatggtaaacattgtaattcccttatttttaaacttaatcttgtagttagttcagttcttacaaagttagcacttgctaatagtttttcattagttatttttttaccaaaattagctaaatgtcgcaatgtaactggatgtgcttcttttttactccaattctccaaggttgaattttgataaaaatgttgttcattgagaatgaaagatccttctctatactggtttgagactttcaattcccttcaccatttctgctactggaattttcttagtgacactcatcgcttacttgttattatactattaaggatatatgtcagagaagtattcaatcggggcccatagaacaatattgtacctactaaccaggaatcatggcattgataaaaatcacaagaatcatactgagtcatagacgcggcggactactaggttcaaccggtaagacgtttcaagggtaatagttacattgatcttacattacaggagcatgctggttgtgcaaatggcagctacaatatctttcagacatgaccattctagtcaaagaaggcatacttaaaggaagatattcaagctgtttaataactaataaataatgatcacaaaaggcccgatgacaatatcgtctgcaccttcctaattgggtaattttggctgtctgataacaaatttcaatttcttttaagtactttacaaactttgatacaaatagaaacccatcacccattccgatttccatcatcagaagaagtatagtccctgaaaaagtaacaagatgaagattcaagccagtgtattactcttattagttgcaaatttaaccaatggtcacatattaccacaacaatatttagaacttgttggaactccggataatacagttattgaagcaaatattcccaacagtttaatggatacagtttttggagatttaattaataccgaatcagtcatacaaacgaaaagtgataaattaggttcccgtgaactttcttacaatgaagttgatactttaaaaacaactaactaccattcttattatgaatccaaaaaaataaacttcccagataaggatgatgtatcagatatcgtttcagatactaatttatattcaggtattgtatcatttgcacatcttccaatcaaacaatgttttgaaaacttagatgaagaaatcgatatagctattgttggtgctccattcgattcaggtgtctcatatactcccggtacaagatttggaccaaatggtattagacaaggttcaagaagattatttggtggtatttctccaattagaggtaattctaaagattccaaactttacagattacctatttataatacaggtttaaaacttgttgattgtggtgactgttccaatgattccattcgatgcaagagttgcattggatcaattatatagaggtcaacacgcaattcataaacataaaacttcaagtaattcaacaaattttgatagaactagagttgtcacattaggtggtgatcatactgtcagtttaatgaatatcaaaagtgcatatgaaacatttaatgataataatgatgatggattagcaatcattcattttgattcccatattgatacttgggatccaaaagttttaggtggtggtataactgaatatgcaagtttaaatcatggtacatttttacattatgctgctgaggcaggatatgtttcacataaccattcagttcatgtcggtattagagcaccatatattagtgattatgacgaaaaacatgataaagaatgtggttttcaaactataacatcaaaagatgttgatactttaacaccaagaggagttggtagaaaaattaaagaaattgtaggtgatcgtcctgtttatttaacatttgatttagatacatttgatgctggaatgattaattcaggtactttagaggcaggtggattaaattcaagagaaattatgactatattagatgaacttgaaggtattaaattagttggttgtgatattgttgaagtgagcacaccaccaaattcaatcggtaatgatgtaactggtttacttgcggcacaagttattgatgaattaattggtttaatggtagtttctgagctttgatttttataatgtattttttatttatattttaaatggttttatttaatgtctatcttctgtatatagtttagtttcatatatttatcataaccaatagaagaattaatcacaacatgatgaggacttacaatagcatcaagttttgctactgttagtgctgttaaatgattcatataagcaagtatatacagtggatgtttaaagttttactaacaaatttgccttaaaaacctctgctcagatgcgcattatatagtgaaaaacctattattatgagaaaatttcacattaatggtgtgagaaaataattagttttccactgtatgagatacaatttctatgtgaatttggcaattttatgcgtttttatcttttctcttcttggtgctaaatgattatgtaaaatgatattttcttcagatccgttgttggagtaatcgtttcaactagtttcttttggaaactgtccattgagaacataaatgaatggtgtaattagtatatcatccttgttatcagaatcagattcaagtgatcggaaagaacctttaaaaaatgatcaaattcttactcaaaatgggaatcttttagatgttaaatcaattcaatcaaatcaaatgaacaaatcagtaagtccaatgtcggtttctaatctgataaatgattcaacttcaaaagaggcgacacccctttccgaatcaaatggaacgaatacagagaaaaatggtgctaaagtgatgaaaaagaaaccttcgtcaactataaataatgaacacacagaaacaaacgccaataagagtaaaaaagataaaactaatgaaccaatgattattaatattgaaataccattatcaacacataatgatgttcatcatgaatttaatttcgttaaactggtggaagaaaagtatggaagatacgatacaacgagtaatgtttcacttgctcgtagttcttggaatgaagatgaaggtgacgatgaagacgatgaagatgaagatgaggaacaagaggagcaggaagaacaggaacaagaacatgaacaagaagttgaagatgtgcctgaagtagaggacgaagtatctgaaatcgaaccttcaacgaacaacgctgtagaaacaacaatggatagctattatgatgatgaagatgagatagttaaagcattgaagattaaatttactccaggaatgagtgatgcagaaaaggaatcattggttttaaaggaaattcatcgtcgaaaaatggttaataataaacgtattggtaaatatgacgttgatgatccattcattgatgatgaagaattagaatatgaggaagatactaactctaatgtagatggatggtttatttggtatggtaagttagacactacacaacagaaaaagaaaccagtaccagttgtcaaaacagagaaaaatggaagaactactaatagtagtcgtgctagaccaattgctaataatggatcaacacagaagagacaaagagaatctaccaatactccacaaccacaaaagaagctaaagaaacaagctactcctattaagtctgtttctagtacatctacaaattctaattctaccaaaaatacagatattgctataaccaagactccaactaaaaccactactgattctaaggccaataccaaaccagactcttccaaaccagaaaagcccgttactaaagagaataaagatgccaaagaaaagaaagagaaaaaagaagataaaccatcatcaaacatcatcattggatctttcgggttttaaagtgcgctctccttgccaaaaattcatgttgaagttttttaaaatttttcaataataatacgaagattttaattgttcttttctggtcaagtaactatgaagtgtcatagctctatattaccattagccacattaactgttttggctacaacattagttgttgaatcatttcataaatattatcttaaagatggaacaaatacatttttagattacatacgaaacttaatagtatcagattcaaaagataagaaagacattccagaatcactcagaattggatctaaacataactcctccaagtcaggtttagttaaaacatcagaaaatacaattgttcacttaccacaaccatattctgaacatttaattttagaacaattaactagaaattattcattcttatcagaggaaggtatgaaaaaaattagatcattaagaatcgttgttgttggtgcaggtggtgttggttcaaatgctattgttgcattagcaagatcaggtgtttcacatttacgtatagttgattttgatcaagtttcattatcatcattaaatagacatgcatgtgcaacactgaaagatgttggacgtagtaaagttgatgttttagttgatttcattggacaaattgcaccatggagtcaagttgaaggtattaatgaattatttagtattgagaaatcagagagattattattaacaatggaagataatattaaaccagattatattattgattgtattgataatattgaaacaaagattgaattattaacatattgttatcaaaatgaattacctgttatatcatcaatgggagctgcatgtaaatcagatgcaactagaattaatattggtgatataagtgtttcagatgaagatccattagcacgtgttgttcgtcgtagtttaaagaaaattggtattaataaaggtattacaacaattttcagtgcagagaaaccagatccaagaaaggcaaatttattaccattagatgatgcagaatttgaaaagggtaaagttgaagaattaagtgctctacaaaatttccgtgttagaattttaccagttttaggtacaatgccaggtatgtttggattagcaattgcaactagaattgtaactgaagcaggtgggtatccaattgaaccagttgaaggtaaaaatagatataaagtttatgattcattatttcaaagtttagcaggtcaacaatcaagattaggatatgaacaacgtacaccatgggttaatttaagtgatactcaatatattttagaagaagtttggagaggtaagagtccaattagtggatattctacaagattaacattaagtcgttggttcccaggagttgaattaagtacacaaaatgttgttgtattaacaaaggaagaacaaaaggaacatgaaaagagagttttattaggtggtgaaaaaatagaggatgtttattcaccagaagttcttgaaagaattgcatatagatttaaagaagaagagtattattcaaaatttagataattttatgaatgtatacaacgtttgatatatagtaatagtaaaagtctatttacaagtaattaacattttgttttataatttctttgaagcagttttcttaacaacttcagcaacttgagaagcagctaatttaccaactttaaaaccctttgattgtaaatacttaacaactgcaggtgtaattgcagcagttattggtaaacgaataaatataagtgatttatgaattgcataagctaatgcaaattcagtaactaaagttgaagatttttcttcagtttcagtatcacttttagttgtactagcatcaatattaacattttcaatttcttttttatatcctataaatttcataaatttatcttgatattctctaataacatcttcaccagcagaatgaacaactaagaaacaaattggtaaatcaattaatgataaacctaaataaatacctaaagctgaataaccatattgatgaattaatttcttaataccagttggaggttttggtggctgtgcatgtttaatagttgttgattggaaacgtaaacctaaattacggaaaaatgtacgtgaatgtatttgagatggtgattttaatggtatacctaaaggtaatttattgaagatattcttaaacattgtaattgattgttaaatgaagggtagtgtatggaattctgtctttatatacgatacgagagggtcttttataatttaacttactaattttctcgttttcatgaaattttgaggatttcggaaataagtggatggtattatgttatatcggaaataagataataaattaaagataatcattaaatattttataaaaaactagtttttaaatgaccagcaccattaggaaaggaagataagatattgcataagaaaagaagaagaaaagaataagtagaaaggagcaaattaatctataaatgggaataaagactttataatttagcctttggtactctaccaacagtacatttaattaaaccatttggatttggtgatgggtaaaataagacattatcattatcaagacctttccaagataaatcaaataagatataatgtttatttggtaaagaatatgaaacattttcaacatatggtgaaatatctaaaatatctgaacacatattgtacattgttgcttgaactgaagctgaattttctaatgcaaatctatctaatgtaacttttaaaacatttaaagcagttttatcgaaaacaccttgatcagctaatttataaatatttttaattgaaccaattttcttttgatcgaatttccaagtacaatcaatatcagttgataaaattctatcactggttggttttaaagttgtataatcacattgatggaaatcaacaaaacctgaaccagttgattttaaaacagttaaatcttttaaagttgaagataaagtgaaatcaccattttgcttgtagtttaattcagtaattttaacatcttcaccatcctttttaaaggaatgatcatgtaatttaccattaacttcatatttagtccatttatgttgagtaattaaaacattacaaccactaacatgagaatatttattaacaaaatgttcagctaaatgagctgcaaatctttcaattggccaaacatcagtttttctagcttcaactaaaattgtatttttaacagtatcagttggaacaacaggtgaattatctgcctttgtatatgatacatcaaaatcaccagttaataaaactctaacagttgcttccaaaacttcttgcttttgaggattatatttatctttttaactttaaggaaattaacgttatctttaccgtaagttgaatcttgtaaataagccattgtgtgttatgtgtgtatatgtgttttgatacttaaaagaaaataagaattattaaagtgaagaagaaataaatcaatcaagaaatcagaaaactaggggaaactcttatccttttataaccacagaataatcaaccgggtcgaaaaactaacaaaacgtgtatatttagataagatctacaaatattaattaagataatgtttacatttcttatcataaacctgtcaaatacacgtcccataattaaatcacaccattaatatttacatctatcgctctaccgttgtattgtcaattcccttccctgtaatacactctatgaagcatgttaaacctcatcaaaagtatcgtaaaatcagttaaaaaatgtcaaaaaaataaatttgctcggtcatctccgaaaaattccactacaaatcggaatgccggtcgtttttctgttcttttgttattatctctattattttcattattttcattatattcattacatcatacattttatactcatatactcataatatttacacatactcttccttactttcaaggaatatccttaaatgaaataaaacatcacttaagtgtttaaaattgacaaatttataattcttatcataaataaatccaaataagaatccacccattttaagaaatttaaatggtaatttaaatccaactaattcactcataattaaatcatgatcatgtaaaacatttaaatcatctgaaactatcttatttaatgtttcttcttcttgtttatatttattctcatgttccttaattacttcatcaatgcttgtagcatcaccaacttttttacctaatttatttaatgcctcaattgcttgtcctgtctcaaaatcttcataattataattatgtttcagaaattgttctaagtttaaaaatatcttgaaaaatttcaaataatatttaaataataccttatcaaatttattcaatgcttcttcaacttcttcattatttaaattattataattataatgatgattattaatacttgaattaacaaataatgtagaatttaattcaaaatgttgtaaatatatgaaatttgataaattattaaatctcatcctaattttgaaaaagttctcataattacttaaaaatttaacaataattaaaataacatcaaataatatttgtgaatcaatactcaatttatgtaatatatttaaattaatcttattcaaattggtaaatgatttatttatattgctgtttttattattcttatcatcctttgaatcatcaattggtggtggagttgaatagatcttatctaaggatttcataactttattatttaactcaaaacttggtgaaattgtaccaattaatgaattatcttcattaaagaaaaccaattttaatatatcaatggaattttcaattaattgaatcaattctttttgaaaatcttcattttttaattcatcatcaccataattaaaacattcaaaatattgttcattaatttcagtgaatgattttaaccaaacactttccttaatcttatttaaactaacaattgaactcagttttaaattaagataatgatttaatatattacaatcattataaacttcacttgtcttattgtataaaacacatgctttaaccattaaattccaaacattaccaattttatgaattttctcaatagtgattaatttactattaccattaccaatttcaattaaaacattctcaattattttattatgattaccaatattatattcatcatcatctgaatcatcaatctcaccagcattacttttatttttaattttatctttatcatttttattcaattgtttgaaataaactaattgatgtaatgcattttgtaaacaaattaatccaaattcactaacatgattatctaaaagaaaatttctattattaattaatccagttttagaatcaattttttcaacattaagtttaattatttctttgataacatgtttataactaactgatgtaaattcaaaattttcaattaatcttttatattcttcttcattaacacaatcccataataatgttgcatttggtaaattaatatttaaatcacttataattaatgatgggaaaatattatataatgttgaaagtaatgttgaaacatggaaaatcatatgaattgtcctaattgttgattcataatcaagaaatattttaaaatcttcattaatattatcaggtacttgaatctcattaatttgtgatgatttaatcattgcatttaatgcatgaacttgtcttataataactgataatgtaatttcttcatcagcaaataatccataaattatacttaatgttaaactttgaattaaccataatggtgaaactgtactgtttgaattattattattattattaccaacagtttttaaatttttcctgctatctaaataaacatgaatacatcttcttgaaatttcatataaatttgatgcatcttcctttttatttgaaacaactgctccaattgttgttataagcaaaggtaaacaaataattgaaacttggaaattattcaaaaaattttcatctctaatatatttaatttcatcccctttataattagttgaatcttcaacacttatactatttgacattattgaattaattgcattttcaattatccaatattcatttaaaatacttttatgaataaatggatgatgagttaaaaatttaaaaatgaattgatcaacataataatttaatacatcaacaggtaatatatcaggtgttggagtaccaaagaacggatattcagataacgcatttttaataaatttaatcatataattggtaaataaatatgaatgggaataagatttagaattattttcattaaattctttttcaaatgatctttcataatattcttgaatatgattattatgattatgattattattgataattttttcagaggaatcattatactcatcaatatccatttcatttgatggtgaaggttccagaagtattggtgatatagtggcttcagtatcaacagttggatgattattagtatattcatcattaagattcatattcatattcattgaaaaattaattacagattcatcataaaacgaatatccttgaggtatgccatatttatttgatacatgcatatcattaattttttctaaatctgaaattggttgattaaataaagtttcttgccatgataaaattttactatttaatccattaactgtattatttgataaatttgataaatcattattatcttgaaatttactcaatgtaaaagattttaaattatttttaagtttattttcatcaatagtttggttattattaatattagtgttatgattattaatattattatcatttgacaatctttcaagttgatgtaaatttaacttatctaaaaagttgattgcattatttgatttattttgcattaatgaattaaaagttttattcagaatttcattttgagcaattggtgaattttttttaaatggactatcacgattatcttttgaatatttatcaataattttacttttgtgagaatctgagcttaaatttgaatttgaacgtattttcgaatttgattttaaaattggatcagacagtcttgttttaaataatgattcagctatattcattgtatcaatatcataaaatgaataacctgtatcaacaacagggtatgatgatttaaatttagtatttgaacgtgaatttgattgagtattagaagttgatcttacttgagaattagaattagatttgaaatcttcagatgaactattttgtgcttttgttattaatttgctcaattgttgaatttcagtttggaatattggttcattattactattattatcaatatgcatttcattatgatcatctgcaaaagtgttaagccatttttcttgttcaacttctaaggagagaaattgaggagttgaaaattccacggtttcacttgcataaggttcagggtttgtcaatgcataattaacaccactcattgctgaaaaagatgctcttctaaaataattaagagaatttggttgtagatcattaagttctgggtattgggtatatgtatctttttcattatcattattatattcgttattttttttgttttcgttatctttatcattattattatcattatcattattgttttttaatttttcattaatttggattttttcctttttaatagatttaccaaatttatcaagttcattatcaacagttactaaagatgaagaaatatctgatagttcacctgatcctatatgattactacttgataaaggatataataattggaaattattatataaagtttgatttatatcagttgaatattgatcatttgacagtatcagagaattttgatctttatcggagttattattattattaaaagatggaatagttatattagtttgaattgaaggattaaacataaaattagttgagattgaagcatttgtagttgaagataaagatgatatatcagttgaaattgatttattatcggataagattttttgcttctttttacgtttatctttatccttatccttatccttatctttaactttatcttttgatttatccttatttttcaatctatttttaaattcttctaattcctctggagataaattattcaattcatcctttgacatatgtttaattgatcttttccttaatcttggtattatatcggaagcaccggcatgtaatttagttgaatgtcttaataataaatctcttctactaaattttcttgaacatatattacaagtgaaaggtttttcctttgtatgagatctttcatgtctttttaaatgttcttgtcttgagaaagctcttgtacaaatttgacaaacaaataatcttggtttacctgaaggtgttgagccttttacagtatattcttgagttactggacctcttgatgacattttagttttcgattgaattcgtaattcattttctatttgattattattattattattattattattattattattatcaatatccatattattattatcagtgtttatattcatattattaaagttaatatccaattgtaaattgttatcaacttttaaatccataatgaagtaattaatatactaattgattgactatcacatacacgaaaggagagattaactatctaatataatagaaattgcccttgcaaataaatgtattggaggctcttcaattgatatataattaaagaaataatttatacctaaaacagaataaaaaatagaaaaattaattttaaagctggaatacctcggaagaagggcagcgggggtgtatattattacgtaacgggggattctctctccgctgattggatgagggctatattattataataataataataatgaggggttattaactatttaacggtcttcctctattacgtaacacaaagaatgacataaaaggatgacataattaattttattatggcatgatgagatttttgattgaactagctttatctactactttttgacatatttttcaccacataggataaacacagaacccttaatgacaaaaacttgtacaaatacttctacaaatacatcaacaaatacttctacaaagagaaatttttgtaaaacttgtgataattgcaggaaatctcactataaatgtgattcatctaaaccttcctgttcaagatgtatctctaaaaaattatcttgtcattatagaatttctgaatctggtggttatagacctagacgtaataataataatataaataatataaatattaccaaatctatcaataaatctattcatcatcatcatcatcatcatcttatacttcatcttactcaattacacctacagattcaataactaaaacttcgtcatttaattcaatttccccagattcctcttatgattcaatttcaacttcaagaatattaaataattattattatcatttccataattctcatcctttattacctgataatataaatcttttaacatcttatttagatactttacctattagttattcaaatactttattatctgcaatggattcaatttcattatctcaagtaatttctaaaaattataatgatataacttttatacccactctaattgataaaatatcaaaatttacaaatatttttaaatcaaatttaccaaatttaccttatttacaaactgctttcatttatattttaacagctcattttgctggattaccagaaatttgtattaaattgaaaaatttagctgctgatcaattggtttcaattaatatatttaatttagattctccaaattcaaattttaccctaaatcatccatttttcaaaccatttattaaatctttaaatatagatataaacatcttattagaattaacaaggaaaatgttttgggaatttcattattttgatattcttataggtacagctgatggtaaaacaatttcaaaactttcatcaccaaataaatcattatcatcatatattaatattaattacccacaaaatgaatcaatatttaattataatttaagatcaaattgtactcatttacttaatttatctataagatttaatatttcaatacttaatcataataatcaagattcaattaatcttaattataatttagtttctgttttaataactaaatgggaaatgattttacttaattattcattattaaattcaaatggtattgttaataattcaattcatcaatcaactttacttttacaatattgtaaaattttcttaaatagacctttctcatatatttacaatttaaatgattcacttaaacatggtgtttgtgataaaattaattcaataccttatactttaacttcattaaaagatccattaataacttcatttactttaccaatgggtgataatgatgatgaaaatttaaattctttaaattctttaaataatcattcatttaaattatctaaaacttggatttgcattaatgccgcaaataaaatttctaaaactttaattgatatacaaactgataatattttatcaacaactccattatttgcatgtactctttctttagcttcaattattcatatttcaagttatatttggcttaaaaatcttaaaactgataatgataatgataatgatgatgataatgataattcaaaggaaattgatttattagtagaatatttgtcattggaactaaatggtatattattttttgcaaatcattggagtagaccattaagattatttcaaaatttatcattagcaattaatcaatcgagtccagatttaattcatattttaattaatgaaaatccaaatttcaaaaactatttattaaataatgatatcttagtattagataacttatcatctgatgataatatagaggatttcactcctaactttgttcatagaatgtttgattttaactttattgtgtagtgtatatagatctgtgtattataaatattacgtaagtggccattacttttcatgaaagttattaatattttcaaatcatcttaatattactaaggaaagatttatgctttcttttcattcaacataccagcctataatggaacaacttagacaaagaaaaaaaccattatcaacgacaattattaaggatgaacattctggattgaaatataattatgaagatcgattatcaaaattaaaacttttcaaaacttcaattttaatgctttatttaacattagcagttggttatttttcatttagtagttatgaaattttttcaatgtggatatttgatatttattggtattactataaaaatgttagagataattcaaatccaaattttctaagagatatttatttcaatgattcaattgttacagcatttcatctatttaagggaattgtactattttatatttttaaattcattaatagtaaattattattaacttatgatgataatgatgaacttgataaatataactgatatatatacccttctttgaccttttctataaaaaaatataaaactgtatgtaattaattctcaatttccgtccaacaaacgcctaaattatctaaaacatcacctaattgtttaaaattaacaattttaccatttttattaataatttctaaaatttcattaatattaataggtttataagttaatatcttataattaaatttttcatcctctaaaatttcaataaccttatcaattataacttgttcaatgttatttgttataataacaggttcaacatcatcaggatatttagaaaaatctaatggttcatcagatttcgtattttctataacccaattccatttatttgggtttattcgattacatatatcttcaattaattcaagtaatttatttctactattactacttcttttaataccccatatttttaattgattagataattgtgtattattccattcctttgaaatgatctattcgttttgaaattgttaagttggtattaatatttgttaattcattgaaaatctcttcggtttgtgaattattagttggtatttcatctatactgtgaggtggtgaatttttgactttattagatttttcattttcaatgactctagtctctgcctttgaataactgatatttaaatcggattccattgaatcaattaaatcaatctgttcgtttattgatttggtctgtactttagagaatgatacatctatctctgatgtttctgcattatcacaaatagttgtatccattattgaaatatgacttacattaccattttcttcttcatcttctttatcaattttagatctagctgtgagaaattcatcaatatcttcatcatcacttacttctgaatctgggattgtagagtctgggtttgccaaattaatgactttcgatattatatcaagtcttgaaatattacctatatcactatcatcatcttcattattattcgattctatatcttctccattacaattaacattaacattatcattatcattttccattacttcttcatcactagataatgaaattatatcaatttcatcatctgatgaattaggtatcacaaaatcaccctcttcattaccttcatcacagctatcatcaatttcaataatctcattctccttagtttgttccttgttctgtacgtccttttcatcaattttatcaaataatgcttgtgataatgtgatcatttcatcactaccacctttaataaaattaaatccttcatagagtacattaaaatcttctgttgataaatcacttggataagtataactattccttataacgtgtctttcaccagtagtatttcctttagtataatcattttcacaaacaactgtattgtttaaatcaataccattgattaatttctccttaatatctgaccaatcctttgatccgattaatgtattatttatttggttttctaaattaccgttttttgatttgagtatggtttgtttgtttattgatccaatagatttgcttactcttttagttttggttttcggtttagatttttttggtgataataaaattcttgatttagttggtgtctctgtatcatacgtatatgaagcaaactgtcgtttaaaagactctcccgtgttcatctcatgattgtaatcatcgagagcaccttgtacctgcgttcctaaactaaatggcattgcctttggaaaagaaaaggaatgtgaacatgctacgtgaacttttagttacgtaattatttaaagagataacgcgtcagttgatgaagagaaagttgatttggtgggagttacgaaaaagttggatttttctttccatggattagagatcaacttctttttttggactgattttgttttattgtttgtttacttcttttaagaaataatgagcgttggtgtaatggacgagaccagttctgtggaagtcattaaacggaagaatgatgaaaaagatgatgaaaagacattgaaaaagattaaacgtgaagaagagaagaaaaaacgtgatgaggagaaagcaaagaaagaggaagagaaaagaatacgtaaagaaaaggaagaaggaacgcaaagctttgaaattaaaggaggaacaagaacgtaaagcacgtaaactgaaggaagatgaagaacgacgtataaggaaagagaaggaggaagaggagaaaagattacgaagggaaaaaattgagcaagaaagattgttaaagaaggaacaaaaggagaaagagaaattggagaaacaacagaaacgtgaagaggaagcacgaaagcgtgaagaaaagaaacgtttggaggaagaagagaaaaggaagagaagggaagcattagaggctaaaaggattgaacgtgaattagagaaacaacaggaagaggaaaggaaattgaaggagaaggagagggaagttaaaaagaaggagaaacaaagtattgttaattttttcaaggtcagtgaatcaaagaacgataatgaacataaagatggtgaaactgataatggagatggtgattatagtgtgatatcagagaataattcaattactgaatttgagaaatactttttctgtgaagctccagttactgaagaaatacacagtaaatggaataacatagatgataaagcagaaacaaataatgattataatgaccaaaataaagataaaaagtagtaaaattacagataataatataccccctgctactattcctgcaagtagaatcattgaaagtttgaattgtggatcaatcgatgaagctaatgagttattccgtaaagtaccattaagatatttgaaattttatgagaataggaaagcacaaataacaacattttcacgtccacttattaaagattcacaattacatccatggaataaatttgaaggtattgattacgataatgatgatgatgatattgatgacgatggtgaggaaggggaagatattaacagtgatgaggaagacgaggatgatgatgaagagatgatgatgatggcgacggtgatgatgatgatgatactgaattcgttgaaaaagatggtactattacaggaactaaacgtagagagggcccattaattgcagtagtacgacactgtcattcttctacaacggaaacagatgagttttcccagtacttctctacattacaatggacaccactggaaacaacacgactgaaaggtcttaaattcccaatagatccatacaaggactactggtcatagtaatactaataataagtgtaaaatctataaaaattcaattaatttacccaaataggaaataacgcgaatatctcccatttttttcatttttttccgtttctttcgcctggaacatgtttcatcaatttgaagagaatttagtggtgttaaattgtgtgtatctttcttttctttaaagtagacaaacaatgtcatctcaagctccttccttgccagtaccatcatctcctgctggtgctgcaccatcttcacctgtgctaccagcttcaaccactcctactccatcatcaccattatttctaccaaattcatcatctcctcaacgtgatagtaatagtcaacgtataccacaaattcaatcacaatcacaatcacagcgaaattttaataacttgtcaagtccaagaccaagatatactggacgtggggatcttaattcatttgatcataatattcataattctcaacaaacttcatcaagattaaattcaacttatctatcatcagatggtccaagtgcaactgttttaccttcattttcatcttcctttattggttcagatgctgataccattagaaatggtaacaatatcaatacttctgatagaataaatccaggacaaaataataataataataataatatgacatcagaaattgatgataatactccaattagagttatttggggtactaatgtttcaattgaatatgttactgataaattcagaaatttcttaatgactttcaaaatgaactgatagatatacttatgatggtacagataatgatataattgatccaactgctgatcaaccttattatattaatatgcttaactattttgaaaaatactggttcaacaaatcttaatttagatgttcaaaatttattatcattatcatcaactagaaatttagctaatttattggttttatatcctcaagaagttattccaattatggatcaaactgttaaagattgtttaatttcaattgttttagacgatccacaatttagagatacacctgaaacttcaaatttagttaataatatcgaatctaaaatttataaagttagaccatataatatttcaaatgaaaaaggtatgagagaattaaatccaaatgatattgataaattagtttcaattaaaggtttagttattagatcaacaccgattttacctgatatgaaaaatgctttctttaaatgtaatgtttgtgatcatacaattattgttgaaaatgatagaggtataattcaagaaccaagaaaatgtccaagacaacaatgtaattcagcaaattcaatgcaattaattcataatagatcaattttcgcaaataaacaaatcattaaattacaggaaactccagatattgtacctgatgggacaaactcctcattctgtttcaatttgtatatatgatgaattagttgattcatgtagacctggtgatagaattgaagtttgtggtatttttaaatcatctcctgttagagttaatccaagattaagagttgttaaatcattatttaaaacttatttagatattgttcatattcaaaaaattgataaaaatagaattggtacagatatttcaacattagagaatgaagttagagaaaatttacaaattgatgaaattagagaattatcaaatgaagaaattgataaaattaaaaatttatcaaagtagatcagatatttatactttattagctagaagtttagcaccatcaatttttgaaatggatgatgttaaaaaaggtttattattacaattatttggtggtactaataatactaataatccaaatactaaaactagaggtgatataaatattttattatgtggtgatccatcaacatcaaaatctcaaattttacaatatgttcataaaatttctccaagaggtatttataccagtggtaaaggttcatcagctgttggtttaacagcatatattacaagagatattgaaacaaaacaattagttttagagagtggtgcattagttttatcagatggtggtatttgttgtattgatgaatttgataaaatgagtgatcaaacaagaagtgttttacatgaagttatggaacaacaaacaatttcaattgctaaagcaggtattattacaacattaaatgcaagaacatcaattttagcatctgcaaatccaattaattcaagatatgatccaaatttaccagttactaaaaacattgatttaccaccaccattattatcaagatttgatttagttttccttatattagataaaattgataaaaatttagatgaaaaattagcaaatcatatttctaatatgtatttagagaattctataagtaatgcatcaacatttgaaattttaccaattgaatttttaactgcatatattcaatatgctaaagaaaatattaatccaaggttaacaaaggaagcaagtgatgaattagtttcatcatatgtttcaatgagaaaaatgggtgaatcaagtaattctaatgaaagaagaattacagcaactacaagacaattagaatcattaattagattaagtgaagcacatgctaaattacatttaagagaggaagttaaagttgaagatgtagttgaagcagttagattaatgaaatctgcaattaaagattatgcaactgatccagttacaggtaaaattgatatggatttaattcaaactggtataagtacagaggagagaaagagaattgataatttagataaggaaattatcaaaattttagaaaattcaactgaaattgtttggactgatttaatggaacaattaagtcaagaattaggatttaatgttgaaaatcatgaattaggtgaatcaattagaagattagaaggtgatggtaagataattgtatttggtaatggacataatagacgtgtggccattaatagacatgttgtataatagtttttgtagctttttatattaattttatgttataatttaaagtttagtatatactatataagtttcgaatagatttcctatttgggtaatgcgtggttaagtagcaatgcctaggagaagattagttttagctaatatcattacagttaaagaaggtataaatgaattgaatgtactattataatagattacagtcttacataaatttatagtatgataactactaatatacaactataataccgtatataaaccctataaaacgacctacacagctataataacattaacagtggaaataatttaattggatgagcgagtgattattttccaacatgaattttaatgctttacattagagttattatatattgatgttagactgatttatattataacacatccatcggacaatgtttgctagacaatctttaagaactgcatctgcacttagaaacaccactgcaagaagatctgcttcatctcttgcagctactgttcaatgtatgtattaagatattcacaaaggaatttttttcatttcgatttctccacattttctatcagaccatgaatactaacattggcaataaaccacaaattactatttattacagctctttcagaaaaatctatttactatggaaaggttgcagttgaactttctaaaggcagtttatgttaaggaaggtttacaaccaccaactgttgcagaattcactaaagtttatgaatgtgcagttgcagaatcaaagaaatttgcaaaggatccaaatgcacttttagcattagttgcaaagaatgcacaaggtttctcaaaggatgaaattttaagatacatttgttacttcattcaagttgttggatttttctcacttggtgaaatcattggtagaagaaatgttgttggttatgcagaacaccattaaattttagacctaatataccttattagactattatccccatcatatatattcatctaatttatttatagttacctaaaaaaaagagtatcttattttattatcgtagaaaggtatgcatttactatactattaaaaaagaatttctatattgatcgaaaatattatgtacaaatttataaaattaaactatttattgaaagttgggattaattcagttgtgataaattcttcagctattgatttaccatatttacaagttattgcaccaatgattgaagaagtaatagttgagtaaattccctttggtttatataatttatcaattttaccacctggtaaagctttcttacagaagaatactgaatcaatacctttatcttgagcgaaatatgcaagtaatttatctgaccataaaagacgatgaccaatagaaccaattgcagttaattcattatttgattgatttaatacatatttagttgcaattaattgtaaagtttgttcaccaataaatgataattgtgaattataaggttttaaaccatgagcaaatgatttatgagttaaaatttgtaataataaatcattatcaaattctaattttttcgataaatttagtgattcaagataatttttcaatactgatatatttgaattattttcaccataaccataactaataccatcagatgataaaatttcacttggatctcttattaaaccctgtactctttgaccacgcacaaatactacagatcttgtacttgtagtattatagatggaagatcctactctgttaaatatggagggcgttcttaacattctactaaaggattgcatgctgtgtgagtgtctgaaacgggtccctgtaaactacctaccaacacactatatactaagtcagacatttaaaacgtccaaagagtgaaaattgaatttttttcatcgcagctttttttaatatggaaatttcatttcactcagtggaaaatttcactttcctttttggtattatgtaaggtaaaaaatattttttattttaattttaattttattttatattggtatgaaaaatttatttatcttcttttaaaaggtatatagtattagacactaaggacaatggatatatttagagtgttaagtagaggtgcctctttgaagaaatctaaagattacagagcagattttacagttcctgagaaaaaatcaggtgaaaaatctaaacaagaaattaaaaaggatgaaattttaaatttacaattagataaagaattagattttttcaatagtaaacaacataagataattagagatattgaacaagctaaggagaatggtgataagagtgatgatgaagagtctgaagaacactttaaaagggaagttaaaattacaacaaaggaacaagctatagaattacgtaaacaatttggatcaaaggttacaggtcatgatataccattaccaattggatcatttgaagatttaataagtagatttaaattaagtaaagtattattagagaatttgattaagaatggatttagtgaaccaactccaattcaaaatgaatcaattccatcatcattatttaaaagagatataattgcatgtgcaccaacaggttcaggtaaaacattagcatttttaattccaatgattcaaaatattattgatagtcgtaataataatgaagatgaaatacaattgagaggattaattgttacaccaacaaaggaattagcacaacaaattaatggacaaattaataaattaattgaaaatttaaatattaaaagtggttatcttaataaatcattagcatcaaaatttagaaatgataataataagattaaaaattctaaatttgatataattgtaacaacaccacttagattgattgatttaattcaaaatactaaatcattagatttaagtaaagttgaaaatttaattttcgatgaagctgatacattatttcaaactgatttcttaagtcaaactgatgaaattttatcacatttaacaaatccaaaattattgaaaaatatttattcagcaacaattacatcacatgttgaagaattagcaaataatataatgaaagatccaattcgtataattattggattaaaggaagcagcaaatgccaatattgaacaaaaaattatttattgtggtgatgaacatggtaaattagttgcaattagaaatataattaaaaatggtgaatttaaaccaccagttataatttttttacaaagtattgaacgttctaaagcattatataatgaattattatatgatggattaaatattgatgtaattaatgcagagaagacacaaaagcaaagagaggatattataaaaaattttaaaaacggtaatttatggtgtttaattacaactgatattttagctagaggtattgattttaaaggtattaatttagttattaattatgatgtaccaaattcttcacaatcatatgttcatcgtattggtcgtacaggacgtgcaggtaaaaatggtaaagcaattacattttatacaaaggaggatactgatgttattaaaaatgttataaatgttatgagagcaagtgatcaattagatggtatgcctgaatggatgagagatgaaacatcattatctaaattaagtaaggatcgtaaaagagaattaaagaaacaacaaggtgaagaggaaacgtataagtacagttccaagacatataagtaaacaccaacatgcaataaacccaaagaatggtggtagtggtaagaagaggaaggtataatattttgtaaaagacgcgttttgtaagtaaagttttttttattatttttattaatgggggaaaacattgtccaacatgaaatattcgtatttagttaatgctcagcactttttctcctttttgatttgccttttacttttcatttagtagctatccactctctttacaatgactccacaggaattggagaactatagggatgcacttcaaagtttcctgtcactatgtggtgggaaattaacacctgaaacttctcaaagagttattaaggctagagataaattgaaaaaattaacaactgtacaatttcatgatttaagtattgatgttcatgatgaaatgatgagaagagaatataatagattaaacgctgatgatccaaataatgcaaaatatttaccttctgaatcaaattatcatcctaaaagaaatcaagcaagacaaaaattagctagtttaccttctacaagatttaatgatttagttaatgatgttgtatttgaaattaataatagactcgattatgttaataataataatactacttcaaaggatcatcatactgatccacctgttgcactaccaattccatctgttaaggcaagaaatcctaatggtttgactgttaatgtagataaatcaaataattatgataaatcatctgatgatttctcaaatgtgataactccaataactccatctcaaagagaaatcaaaccaattactctagttcctaagaaatcagaactcacatggtcaagtgatgatgaagaagaagatgagaatgatgacaatgataaggataatcataatgaagaatcccgtaataacaatattattgctaataaacaaattcaacttgatgatgatgcacttcacagatctccaagtaaacgttatactattgcaactaatgaagttctgaatgaacatgcaccttcagatctgagattcccagttgatgctgaagctgattatgaacatgaaaaaattcaacatcctaatgaatttgatgaaaatgatgatgatgatgataatcatattgatatgacaattaatcatgaagaagatctctatgatactgatatgttgaaaaatgaagttactgctttaacttctagaatacacgaattagaattagaaacttctaaccttaaatcatatgaatctaaatacaatcaactgttatcagaaaatgatgaattaactcaaaaagctcaagactatgaattaatgaaaactgaattggatgaattaaaggaaaagtattctcaacaaagtgaagaaatgattgcattaaaggatatagctgatagtaatcaagaaaaagaattaagtgtcgaagattcagctgaatataatagtctgagagcttatattgataaagttttagaaagtaatgaattactcaaacaagaaattgctgatttacaaaataaaaaagagtaatgaagaaattgataatgatttgttaaataagaataatattctaaatgaaaagaatattgaattatcaaattcttatgatgaattgagtgataactatcaagctttacaatcaaaatatgaaaaaatttcaaaatcttataatgagttagagaaaaaatctaaaactgctgcaattgttacaggtgttggagccggtgttgccggtttagccggggcaactggtttagcgacttaattctgcaaaagcaacaggttcattagataaagattcaacatcaaatatcatttcaaaagctgtagatccaatagataactcaccaatggttgataattcaaatctttcaatcgttgattggcaaaataaatttcaacaattacgtagtaatcaatttgaaattgaattaacttcgctacctaaattacaaaatgatgaaagtttatttacatctaatggattaatttcaattaaatcaatttctgatatttatacatcttttgagactttactaatttacttagattcaattaaagatagtaaaaatattttattagttgatccaaagaaaattgatgcgatcgttttatttgaaattgtggcaaatactgtaagtaaggttaatttattatctgaatcaatcaaatcaaatggcgaaaaaattgacaaagttaagaaaattttgaaaaattcaattgcaaatctattatcaacaactaaatactatgcattatattataaaatattacctaaacttgtactcaatgcatcaataaatgatgtttattttgcattttgttcattagtttcattagttaaaattaagggtgattctcatgaatgatgaaattttaagtccaaaaatggaaaattcaacattattaaatgataatgcaactgtaacagaaactccaattgcattcaaatccattgatacagtgccaaatgatgatgaatctccaattaaagttcagaaaggccagatctggttcaatagttaacgtaccaactactagaccattaagaattacccaaagattagcatcaaattcaatctctaataataatcttgaaaatccaagtgatattaataaacctctgtcaaatattaactcaagaactggatctccaatgattttaaatagttctattttaccaatgattgttacatcaactgataatttagttaataatgcactcggtaatataagtaatggtagtattgaaatgagaaataataatagcattaacaacaacaataacaatattaataatccaacatctaatttgagtaaggcttataataactaattcagttgaagataaaaagtattaataatgataatattaaaaatatgaattttgatccaaatgatagtgcaatttcagtatctagtaatttagtatcaccagaaaaaattgatttaacaaatagagtaactgaatctcctgaaaaattttattcacctcaaaaaattgaaactccaataaaggaatcagtttaatgaatctgataaagttacattatcatcaccaattaaaaatatcaaacaaacttcaatatcatcaataaacggactcaatgaattatcatcaccagagagacaaaattctaaagacaattcaattcacatgaaaggaataagttctaaagttagtttaacatcacctgtacgtggtaaaaatattttagataaagtgaaaaaatttgatacatcaattgaagatctttcaaataattctatcgattctaaaaattccatgaactctaataaagttaaagtaagtggtgatattgcaaaagcatttgataaatttggtgcgaagagacgtagtgttgatttaacaaatgataataacaataataaaccaactaatgatgaaaatccatttattgaaaataaatccaatttagaagataccaaaaaatccttcaattttcaataactcagttgaatcttttaatagtagtattgaagactattcaggtagaattgttgaaaatactccagtttgaggatccaattttaaccactaactctaatcctgaagaaacatcacctgtaactccaatatctgatcaaaatgatgatactgttaatgctaaaaagatggaaatccaaaatgttaatcaagatgaagaagaggaagattttaataaatatggagaaagtgctaatacttctaatattgagcctcaaattgtaagtaaagaatctagtagtgttgaagatccattaatttcagctggtagtgcactttgatattgatgaagcattagttaggaaagttagtagaagagcaagtcgtgtaataaataaaaagaaagttcaatcattctcatctatacctggtgattctgattctgaaataccagctcaaatacaagcacaaaatcaaactcaagcaccagcaccaactcataacgcaaacaccagctcaaagcaccatctccaactcaagctgaaactcaaacatatgatgaaggtacaggtagagaaggatggaaagtatgatggagaagaggatgaaagtgaagaagatgaagaatttgatattgataaattcaatacattaaatccagataacacattacgtgaattattattatatcttgaacatcaaacagttgaagttattaaagcaattcaacaaacattagaaagtattcgtgatccgaaggcaactaaaggattattaagaaatggtgcaaatgagattaataatgttgttaaacaaatgagtgaaggtacaagtacattaatgaatcaaagtagatatattgaaagtatgggtcatgcaaaatatgttgttggagttttagaggattgtgttcgtagaatggaagttttatatggtactgatactagtaaggataatgaatttgctggtaaaaattttaaacaacgtagtgcaggtattgcatttgatgttgcacgtagtacaaaggaattagttaaaactgttgaagaggctagtcttagagatgaaattgctgtattagattcaagattacgtagagaatgatgtaaagttaatgtgtattattgtagataaataaattgatttttaagtaaaaataaatcaaagtagaatgtttttttgttgttatacagaatttattgaaaaatatttctatatagccaagagaagagaaagaagaagaacagcagtaaaagcaaattaaatattaaggattgtgtatatgaatattaaagtttatgaattttattcagttcaataatgtcagtttccatttctaaacttgtctgattatctatacttttggtaatgtatttttccttgataaacttgtaaaaaacaataagaggagctgaaagtccataaacaatgactgaaactgtaactataaatgaaacaactgggaaaactgtattaattaaatgagataatggaacctcatttggaaccgttatatcagaaataggagtttcctctgtatctaatgcaaatttttctaatttggagatagctaagatacatgcaaagagaccactaacaccaattggaccaaaatgactaacaaatattgcttccttaaatgaatgaatatctggtgataatttataataagctaaaacaggaggaaatcttcttaagactaagaaaacaattgcaataagaattaatctccaaacatctaaatgtaataaatgattattaaaattttcccaaggaacagaggcaccaaaataaataaaataagccatatttaagaaacaatccaaagaatccataaaactctcttgttctaataataattcaccactttctaaccaatcatcccaaacaaaaccacaacctgcaaagaaagcagcgagtaattcatcgacacctaaaagaggagttataccagtaatgaataaacctatcattataacaaataaaaccttggattctctattaatccagtctaatttttgagagagtctaaacgcccaacttaaagcataaccaataatgaaaccaaagatggaaccaaataaacattgatataagacagtaacacagataaagtctttagcgattctatgactatccccagcatcaataattaaatcaacagctaaaaagacaaatggaacagctaaaccatcattacaacctgattcagcagtaattaaatgtctaatatgagttggaacaaattctgctgcaaattttgatttaccgataacttcttgagctaaaactggatcagttgcggtaacacaggcagatattaataacccccaagtaaatgaataatcaggtaaaattaaatgtataaaagctgcgaaagactaaccaaccaataatcattgaaaagaataattgtaaaaaaatagcataagcattacgaaagatatattttggaggtaattcaataccaactgcaactaattcaatacaaagtataattcttgaaatttccaaagtaatataattaaaattcccccaattataaggatttacccaatttaaagcatgaggaccaataattaaaccgaaaattgcagctaaagttgcttcaccaatataaaatttttcctttataagacgagatactaagcaaaataatatgcaaaaaaaacctagacaagcaaatgatacatttgagttatctatctctagttgattccatgccatatactggtggaaaggtgtatgatttgattaattcaagtatgcaaagagattgaaaagaaaaattaagtgaattgtacactaaagataaacagcattagagtagtgtacagtagggaagtgaaaaaaataaaaaaaaattcaaattattatgggatgtaaatgattacataacccaccactggtttaagagaggtatataggtttcgatgaagatatacaagagggtattagctctccttttatagttgtagaaggcaaaagtgaaaatgaaggctcattccatttactttattaaactagatttaccccccactcctttagaggaggctcatttgtttctggattggagaactttacttcttttcacttcttttgcttcttttgcttatttcacttctcaaatccttctacagtacatactacactcgtagtaagcctttaatcttctaattaagatcttttaattgaatttcacatgatgaattaatatagtaaagtatgacataagtagggtccaagcagagcctgactccgacatgaataggattttggtatagtctgacaaggacttgactacgatttgattagaatttgattatggcttgattatggcctgagtacagtccgactacaatctgatcactgattgaataggaccagactaggatcagactaaaaatttaagtagagcctgtttgaggcctaatttgagtctgactctagtgtatggctaccgcttgatcaaagtctgttaagttttaaataaataaagtcgctataaattaaataataactgtaataaaataagtagggatatattcattaatagtaagattaataatttaatgattttgattaagcattaaatataatattgagtgatcagatcattttaaattcttcatttgggtaacgtattcttttaatgaatgagtacctttaataactgtaatatcatctctattagagtataattcactatgaagttcatcatggaattttggtgataatgaagtgaaaatacttaaaattgtatctctattaaatccataagtttccattaaatcagcaacattttcagctggtacatgattccattataaatcaggtttattgaaaacctttgcatataatttagttaattcaggaactgtagttctatcactttcaacataaattgtcttgaaaacagtttcattatccttacctttctttggaggattttcaataattttactaataacatttgcaatatcatctaatgaagtatatgaatgaactttctttggatctaagaatgaattaattttacctttttcaatttcaggtaaattaactaataaaccagaataaaattttgaaggtttaataattgaaatactattaacattaccaattaatttattttttaaaaatttgttcattataataatgaaattctaaaccaccaatacctggtttatgagtaccaattaaacttaaataaataatattaggaacttttgattgtaaaataatatcagcgatatatttcatttgtttatttgattcttgaacaatatttggaattgtataagataatgaatgcacttaaaacgaatacaaaatctgcaccttttaatgtttttaataaaaattctttatcatcaatatcaccaatagctggaattgcaccaaaggacttaatttcatctgctttctgtgaagaacgtgtaataacaactgtttcaacaccatccttagctaatttaattgcaagtggttttgcaacattacctgttgatccgaaaagtactgctttcattatttgtttgttgatataactaaatgacacatttcctttcattaccaacaatctactactgggaactacccttatttatatacacatcagagtgataatactaagttcggagttttaagataagtcctattagaaatagcaccatctttgtggcgcattaaaggacggattacaaatagcagtaattactaataataataataataataataataataataataataataataataataataataataataataataattagagtttcaagggtttactagtatatatactaaataattagttaatagatctataatatgcagtttgtgttatttgtatataactctgacctcttttgaaaagattcagtactaaatccgtgtactatgagaaaattggcattgttcacattttttagttaatgaacttaatattatttaatataccataatctattgtttgcatatcgtatttccatcatttcctattatatatcactgaaattcttttttctttccttctttaccattactttctcttttttgtctcataaaattaaacgaattgttttaatacgggactcttcctgttttattcttgagttaatttaattaaagccccaaattttagtcttcctatttataaatttagtacttttcatcccgataataaataccttgctttttttttccttccttttctcttttcttctctttccgtctttcgttctttctataataacttactccatttattaaaattaaattaaatttttaatttcaatctcaatttcaattaaattttgactcgttcactattatattcaattgcaattgtttcaagttacatttacattcacatttacaatggaattacataaatcattcgatcaatttaaagatctatcacatgatcaaggctataataacaataatgataatatcaataataatattaatcataatggctatccaattactttatcacaaagtcaacattctgttactaatgaatcattctttaatccaatgactaatatctctaataattataataataataataataataataataatgatcatcaaaatcaaaattttgatattaattataatgaatcagataatcaaattcaatcaacatttttacaacattcacaatcacattctcatatattaggtagaaatagaaataataataataataatgatgattatattattaattcaaatccaatgtttatatctcattcaatgagttcaattaattatgattttaataataataatactggtaataatattaaccataataattttaataataatatcaataatcattcaatgcaaaattcaacaagtgttaattctttaatgaatactagtaagattgataaaagaagtaatattactaataatcttaataatggtaattattatagttataatacaaataatagcaacattaaaaataatagcaataataataatattcataataatgaaccaatgcatgaaagttttgataattatcatcatcaacaacaacaaatggaagcacagatgcaaatgcaaatacaaatgcaacaacaacaacaaaagcaacagcaactacaacaacaattacatcatcattcacaacctccaccaccattaccaactccaccacctccaccaccattaccatatgagaatcaaattttatatgaagatttattagaattatccaatattacattaaatattgatacaatgtttaatacaattaatataaatgagataccaattgattcaatttataaaggttatgatattttaaaaaaattggatatattatataaaagttggatttctacattaaatataacaaacagtatgtcaaatatgaatcttaattataataataataataataataataataataataatatacaatcaaatgaagataaattaaattcaatatctgaaggtaaagaattaaatatgaataatattaatcaaattaaaaagaatgaaaaggataatgataatgatattaatgatagggaaaaggaaactgagaaatttgcatgtttacattgtaaatcaatgggtacacctgaatggaggagaggacctgaaggtgagagaacattatgtaatgcatgtggattattttattctaaattaattaaaaaatatggagaagatagtgccaaaatagtaatgaaggataggaaagataatggtaaatgtaatgatcgtagaattagtctaaataatttataaacaaaaaaactagataactagataacttataataaatcaattttataaattacgaaaggttcataatttgtatcaacaatatttgaataatcatttaatttattatcatttaataaattaccattattatcaattgagaaagcattaccagctaaataactaaattttttaatacattgattatagattaaatctaaatttttaatattatcaattttaattaaataataattaaaatttggaggtaaaccatatcttaaaacggattcaacaaaacttcttaaaaattttatatgataataatcaattgaaattattgaataagcttcccttgataaacgtaaaatatcattttttaaattattttcatcaattaataaattattaaattcatcctttaatttattaattgttgaatcattataagtgaaatctcttggtatccatttattttctcttgatgcatgtaagaattcattttcaaattttttaaaaattataactgaatatagagaaaattcattatcttttgaaattaaatttgctgaacgaggtacaacaaatttacttattgtttcataagtatttaagaattcattttcaattgaatttggtattgctaataaaattgttttcaaataatctgaattttgaataaaatcatcctttttaacaatttcatgtaatgatttaattgataaatcaccattttgtttacgttttaaattaattaaattatttttaatattaatataatttgaataagaattacgtaaatcattatctaattgaattgaattatttgaaattaaattaattaattcatcaattgatttttcaattctataaattgaatttttccattgaaatttttctaaatatgatgattttaattgattatcaatttttaaattgatatttgtactagtactatatcacctaataatgaattaagtatttctaatgatttaataattgataaatttaattgattatctaattttgataattcttcactttgtaaaattaatgaatcaagagtaccaattttgaaaattggtaaattaattttatttatattttttgaatttaaatttaaattattttcgaaaaaatttaaatttgattcattatcactatttgattcaggtaatgataataatatatatgacatggtggatggaagggggagattatagaaaaagaagtgtgtatttatagtcttactatcggataacaagtggctgcttaaaattatcctaagttgagaaggtgagaaattaatctatatagggttattacgtaagatgggattattattattattataactgtgataacttattagagagttctgatttaagattatgaacatcattattaatgaaagatttaatattgattaattctgatttccatttattatccattaattgtaaattattgagtttattttgataaatttcatcatgtaattgaattaatttaaatttttcatttaattcatttttaactgaattttctataatttctgtataattatcaggtatgttataattatctgttagatttaaatcatctctattataaatttcagagaataatttatcatttggataatctaattgagatgaaggaggtgattgtaaattttggaaatttaaaattggtaaatttaataataaattataaagtaaattataagattgatttaatttaaatttttgaatttccaataataaaagttgtgaattgtttgttattatatcattttgtttaattattgaaatattttccaataatgaattattaattaataatttaaaattatttttattattaattaaattaattgaatcgaatatgatattttgttgaattttatttaatgatgaaatattaaaattatttgattgtaggatagataatgaatctaatagtagattataagattcatctatagatgtgaggtatttgattgattcttccattaaagaaagaatgaattggaggttagataattattattattacgtaagtaaaattacacagtattataaatgattaaacaattggttctgttgattcattaagttcatcttttgattcttcctttgattcttcctttgattcttcatctttaggttcttcatctttagaatcttttttagagaatggattaagatgaggataagttttaaataagattgtagttgcagagataattgctaatgaagtaattacagtaattgataattgacgttgttttttatttaattgcatgattgtatgattatatgatggtatgattatatgattatatgattttattatattaataaaaagagaagaagagtgtagtatttaaataaataatcaaataatgaaatactcttatcaatatatcagtataagaataagaataagaatatttcgctagaattacctaaaagggaaggtctatccattatattatattataatatactttaattaggcgggtattttaattttaatttaaaaaattatttaaaaaatttatacaataaatatattaatagaggtatctatacttataataaagcagctaaacctgcaattgcagctaaaccaccaccaataacagcttttggagcagcattttcaaattcagaatgagtagtattagcagatggagcaactgggattgaagtagttgaagttttagttgcaggtggtgcagttgtagttggagcagtagtagtttcagttgaagttgaaatttctggttgattttcagttgttggagcttgaatttgaccatcaccaatttgagttaaaactttatctgcaacaacgattgaagctaatgaaaggatagttaagaattgcattgtatgtatgtgtgataaacgagtgtaagagtttgaataaaagagtaagaggaaagaaaagaaagaagtagagtagtagtatacataagtgggaagaaatgatcttttatagcaagagagagagtggaaaatataaagagagaataattataattattattattattatgtaaacacgcgcttttatttatttgtttacttttcgtttgtttaccttttactgtggtttttctattattattctattgtttattgtttattggatggtggtgtgttggtttattatattattattattattattatagtaaggtgatggtagtagtagtaaggagatgctatttattatttattactaatgattatgtaataatataaagagtggaaattattattatagtatccgacatgattctaggctgtcacgtgagtgttacgtaatcattgtttattgtagtggctcatccttttttaattgccctattattacgattatgattattattatgataactattattactctcttttaatattttattattttaagtagtatcttcatctatcaaccaaccctttctaaaatctatacctgcacattctttgaaaatgccatttttctctttctaggctcagctattttatctctttttcttcccatcatctctatttccttattatttcactaattaacactatacattacttaaataaacttttctctttacattgataccctaatacacatatattatcattgattaacctacttttttattccatattacattattttattattatctcacaacatttttcttgtcgtgataatggacatgaattttttttcttttctttcaatcttctatataattttttaatcttatattattaaaactttatactcctcctccatacaaccaaatggataataaattattgaaaaaattgaaaaaaaaatcatcccttccaatcatctatcaacttaccattcacagaatctcattttaatcaacttttaaatgaatttaatttaattcatttaatttatcatagaaataaaaatcaacatcatgtctcaaattggtggaaatttcttaatttaattcatagaaatttacgtaaattcttaattattattatggatattaatgaattaattcatttcaataatatttctaaaataaattattcaaaaacttgtaaaaattttaaagttattaaaaaatctaaaaaaatggataaaaattctacacttttattattaaataataaattaaaattatttaataaacaattatcatatcttaaaaaatcaattaaatcatcttattggaattttatgaatataattcaattagctcaatttgttaatataggttttgcattaattgcaattttatcgaaaattaataatattttattaaatattgaaaatatagggaatgatgataatatagtaaataatgataatattataaaaaataatattatagaaataccttcaaatgataaagataatgaagatattggtgaaataataatacaaaatgatgaaatagaggaattagaggaaatagtggaagtaccaaaggaaatatcagaaccagtaattgaaccaatagaaccttcaccaacagaaccaaagaaaaagaagaaatcatcaaaatccaagtcaaaatcaaaatcaaaatctaaaatcacattctgcaattgatgatatattcggtttctaatcaatatttatacatataatactttactaattatttaatatttcatctgcccatgtaggtaaaataaaacttgcttcatgaattttactattataatatttaaattctcccttaacttctctattagctttactaatatcaatttctttattcttaccacataccattaatgatatttgtcctgatgtatatgatggtattgtacaataacatgttttaacaattgggaaaatattttcacaaacatttttcaaattttttaaattatttaaatttaaccaaatattttcacttgccattgaaattacaattccatccttatttaatgcattatttaataaattaaaatatccttgttggaaaaatgcttcagctggtccttcaggatctgatgaatcagttataattacatcaaatttcagtatctatccttatcatgaatttcctttaaatatttaaatccatcatcaagtataactttaactttctcattttcatatgatttactcatatttggtaaatattttttacttaattgaataaccatatcatcaatttcaactaaaattgcttccttaacattatcatgtttaataatttcccttaaaactcctccatcaccacctccaataactaaaactctctgtggatttggatgtgcaaataatggtatatgactaatcatttcttgatatgcaaattcatctctttcagttacttgaattataccatctaaaactaaaacattaccaaaatttgttgatttgaaaactaaaatatcttgaaatttagattttgaacaataaagaattttttcaactttaagcataaatccttgtcctgggaaatattcatcactaatctctctaaaccatccatcaatgattaatgggtgtgttaattcactcattgttttgtctatgtaaaagaaatttgtagtagtagtagtagtagtttatatattatttttcctcattatgtaaagataccgctattacgtacagtgcatgaaaaaaaaaatttttgaaaaattattcagtttattgctatcttctaaacttttcaacaaccaaggaataacaatgaaacatccatttcaacactatattattagataaaactggtgaatatttctttgctgctgctataaatactgtttttctattcaaaattgttaaaaatgatgaaaatgataatgatacaaaattcagataatatattgaaaatgctaaattattaggttcttggactgatgaagttgatccttattatacaattagaaaacatcatagagaattattagaacaatatgaacaacaacaaagagaaaaggaggaaaaggaaaaagctgaaaaagctgagaatgaattaagttcaaattcaacaaatgaaaataataaaagagaaataattccagttgaacaaattccaacttcaacaaagcaaattatgaataagagaccaaaattaccattacctggacctggtgctcctccaacttatacttatattagagatatgacattatctaataataatgaatatttaattataacaactgataatgataaagcagttgttgttttcaaaattaattataatccatcaaatgataataataatgataatgaaaaagttttcaatttaactaaacgtcaaccaatgatgaaacgtccaagtgctatttgtacaactattgatgatttaaatattttaattgctgataaatttggtgatgtttattcattacctttaaatgatgaaaaaattttaaatgataatgaattaaaaccaattttaggtcatgtttcaatgttaacaggtgtttataatacaattgatgaaaataataatcaagttatatttacaactgatagagatgaacatatacgtatctcttattatcctaaaagttatataattaaaaaaattttatttggtcataaagaatttatttcaacttttattttaccaaaatggtgtaataataatatattagttagtgcaggtggtgattcatttatttatacatggttatggaaatctgaaattgaaggtaatgaaattaaatgtaaatttaatgttgatgatttaattaaggataaattaaatgaaaaacatttagtacctgaaaaatttcaaaatgattcaaaaaatttagttgaatattgtatttctaaaattattccattaaataagacaaatcaattagcaattatatttgaaaaaattccatttttatttatatttgatttatcaattgatggtgaattaaaatttaatagagaaattaatgtaattaatgatataattactgcaacttgtacaaatgatttattaattttaagttttgataatatggataaatgtttaaatttttatcaaattattgataatgataatattaaaccattagaaaattctttaaaattattagaaactattaataatgcaaatgattcagttattggtgatattgatgaattaataccattatttaatactaattatcttagaaaaagacgtgaacattagtatatctctctataactttatataaactctctcctttgattataatgtgatttatctaatacaccatcaaattttaaacaattcatccaaattttatttcctaccttgaacattaatagtccattgagattttaataatttaacaataattatcttatgtggtgaattattatcattatcattagtaaaaatattagaattatcattaatttcttcattcttatttacagatatcagtgtatcaatccaacctttatccatatttaaattatttaataatccaacactttcacccatttcaattaaaattgttaatttttctaatccattaacaacttcaaaaatataatcatcagttattttcattaatatttttttcattataattgcagatttaccagttattaataaattataaaatgataatgttaaattaatcattaaattaacattcattgaattaatttgaataattaaatctctaaatttattattatcaataaatggtctactatatttaataattgaagtattttcattattactttcattaagtaaattattaactttaatatctttataattaattaaaatttcttcattatttgtaaatggatttgataatatttgatgtttaattaatgattgttcaagttttaaaaattgataatatttacattcttttattagatcatttctatgattttcattttgaattataatttgattaccactcagtccatataatatatcattaaataattttgatgatctattacatgaataaggagtcattggtggaggtctaatacatttattattaattacattataagtatctaataaagtaccttctaacatagttgtaaaataatttggataattaccattttcagttaataaatctcttggaattttaaataattcaccaccaattctaatatgtaaaggttcacttaataatctatccattaatttatttaatttaaaataatttgaatctgttaataaataaataaattcaaaatcatcattaattttaatactataaccttgtaaatgtaaataaattttatcaaatataattgatgatctatcaattattaatttatttgtatttggattatttaaaaaataatttgtaaaatatgatggtgaatcatatgataatgatgcaccacttaattgatattgttttgtaccaaattgtaaaatatacaattgttcatgtggtaatacttgtggtattaagggaggatgattatcattattattttcatgatttgtacctgatgatatactcgtatgtgaactattttgcattttgattggtggtaaatatatatacaaaaaaggttgttttagtttaatgttaaagattacataatccaatattcagtttttaacctgaatatacactatatacaagtagatttataattagatgatattttttattatataagatatgatatgattatataattagatatatagtatatattacaaagtattagtagttgtttgaaagaattgattttgattctattattattattattgttattattaatcaactaatttttattaaaaaaaaatgaaagtaaaaaaaaagttttttccaaatttgttatgttgtgatatgatgtgatatttatattaaagcgtatgataatagatgatagaaattttaagttattaaaatttaaaatttcattgaatgtggtttatcaccagattttaaagagaatgaagaagctaaatattgttttaataaaggagttttcttaatttcagtaattaaagctttatcaacaattttttgatcttcaattctttcacttctaatttctttctttggagaaccttcaccaaagaaatcagattcagattttttattatttgaagatttttctcttgcaaaatatgatacattaaatttatttaaatctaaattttctaatgaaattttagttgaagttgcaataacatatcttgcattaactcttcttaatggaacaccattaactttaaaaggaccagaaactaataaagtattatcttctaaattctttaaatagacaactcttttacctctaaatctacctgctaataaaattaaaacagtacctgggactaaagattctcttaatttttgaggtcttgcagtctttctggtaagtttagcagtttgttgggttggaacagcagacattggaatgtttgtttgtttagtaaatgaaataaagtaaagaaaaacttaagaaagatacaaatatatgaaaagaaatgataatataataatactgaatgtgattatgcaataccctcccagtgactcacagtgaagaatttgccttttaacagtcacagcgtcttttcaaaaaaaaagctttgaggggacgtactgtgaaattttaaaatttgattattaactgtgagggttattcaataattaatatatcacgtgataccagcaagggtttcactattctatattctatattctacaattgcaatactacctttatcagttctgataactggtataatctcataactgataccttttaattcaatatcactcatattgatatctcttggattaccgtatatctcatacattacacccttattgaatgtaaattcattgatattattaacatatcgtatatttaccttttccttattattatcatcaccttcttcttcttcatcacttgattcataatttaaactatcgtctgtaatcttatgattcataccagcccattcaactactgatcccttaggtaattcacttatttgaacaactaataatttatcatttaaactatcatcacaaatttccttatatttattgaaaatattttcaataattgataatttcctcatatctttaatataacaaatagttattaatcccgatttaaaattaattacttccttaatactattataatgttgtaatgataatattgcattaagttcaaaatctaaatcttcattaataggtaatgtcatacttttaggtattaatggaatttgtccactaattcttgcaattccatcttctctattaccaattgattgtgaatatggtccaatattacatggtgcccaatatgatataccttgaatatgtaatcctatttttttcttcaaatcttttaatataacaactgataattgtaattcaactattatttggtaatttagtttcaatacaaattcttgatggtggtaatgcccttttaaaatatttaacatactgtgaattaatctttgtaaaattattcatatcattgattaaaagtttggcacttgaaacattttcaaattcaagtttattatcatttaatattttctcaagttcttggaaaactttatttatttgttcttcacaatcaccatttggtgaacttaaattattaacatacatataatcaccatgtttaaaaacattggattcccaatttatttcataatcttcaatttcatcagcagtaacattttcattattcttcatttcattacacttaatatcttcataaatttcttcaaatctttcagttaataatggtggctcaacaataaattgtttccaatcaatcacttcatcattaacttcctttggttcaaatccaactttcatctttaaataccaaacatcatcatttgtatgtttaataacttccctttcaattatgtttattttaccaaatttgaaaaatggtgcatcgaaaacacttgtctcaaattctccaccttcaccacaaatatgaactccaaacatttgattcaattgaattaattttggttgaatttcatttaatgtcatacctaaatttgattcatttaatccaattgctgcaactttaatgattttagcatccataccactattacacatttcattcattaattcactttgatctctttgccataaataagctaatgatgttaaacctaatcttgaacaaacatcttcaactctagtacgttgataactagataaaattgcaccaacactaacacctttaacatctggatgatttttcaaaacatttgttaataatttaaataaatcttcagtttcatcattatcagttttattatattctaaattttgattggatgcattacccatgattggttgtctatacattggaacgccaatacatttctcatataatgttaaaacatcatgaccaacagtttgatacataaatgaatccatttcatcatcattatttttattatcatcatttggtggatataaattagctaaacaaaccaattcatgtccctgtgcaagacaatgcaagatattgaaacatgaatctttaccaccagaaactaaagcaacaaacttcatctggataaagaagatctgaatagagttttaagaaataaaaatatttttcataatattaatattaaagtggaaaaaaaaatatttttaatcttcactgccttaatgaggtctttcatgtcgtatatcattattgtagttgtataggagacgtgttttatatggtatatttcagtgatatacttcattgaacagtatattatatgtagaatatagtgatagtttattatgatcatctactttgtaattgatataatagctgtataaaacaaagcgtgtaaataacatcaattaatattgctactatcggtagtgataaaaaattctatgttgtttatggtaataatgtaaaccttaaacattttcttccttcaatcaaacaaatgtcaactgattatatcccaccagacatacttgcacgtttacagagaagacacatatcagcagaattcttcaatgtatttgcagaaaagacacacacactctcagagacacttaaagaagctataaggaaagatgaagagaataataaggagagacaacaattactagaattaattgaaaaggagagacaaatctatgataaaagagaagtcgataaacaacacctaaagcttgtaccagatgtacttaccccagaggagataacagcatatgatgatatcatacatgcaatgacacacgttaaaatattactgagaactcaggcaccttccaaatagaataaacagggcaacattcaaaatgatgttcatgtttttgcccttcatctcttttctatacagttgtatcattacattctcttctttatccagggaatcttctttgctttcattgatactcccagctttaaaaaaaaatattattgtattaaatttaactttatcttcaagtttaagtttaaatttaattaaaaaacaaaacattattattaatcaattcaatggctcaaagtatgtgtatatacttttattttaacttattaaactcttactaacattatctatatatagctactgctacaccttctcaaactagtggagatcttttctccgtaattgcaactgatgctccaagttccctttattcaagaatgtcaagtaaaactacagtcccttcaaatgtttctaaaacttctccaattcaaacaaataatttttggggtaatataactttaggtgatcaatcatcttatatttatactcatccttacgttgtttggaaatcaaatattaataattttacaggtttagcaatatctcatcaaactgacgcacaaaaagtttggggtccaattaatgatcataatgctccaaattatttttatagtgctgctggtataatgtcaatggttttaggttcaagtgattttgataatggattttcaatgtctttaacaaatttaaaaaaaatgtcaattgatgtaactttgaaaagtaataatagtaatgcaggttcaatgacttcatctattttacaaggtatgggtatggttactgctgtttataataatttaataccacaaattcattcacaagttggtttccaatcagtttctggtgatactgctccaaaggcaggtattgataaatataaaatcgttttaaatgatggttcagtttggtttatgtatattacttttacaaataatcaatcatgtcaatttgcacttaaagattcaagtcatataattgcatcaaattcaattaataattgttggattcaaatttgttgtggtgattttagtgattatgataaagctgcaggttgttatccaattgcttgtactttatcaggttcaacttcaaataatattggtacttattcctttaattatacaactgcaggttccggtacaactccattaatttatgcatttcctcatcatgttcaatcatttacttcaaaaacttcaagtaaaaaatcaaatgcttcaattaatgatacagttcatggtcaattgattggttatttaacaaatgttttcgaaatgagtgaaaatttaccaacttctgctaatatggatccttggtcaagtattagttcctttaaaaatgcttcatatactcaagatgaattgagttcaattagaaatgctgcagttaaagatattacaaatgatgttgcaaatttatcaaatgttaattcaatgtattattcaggtaaaattttagataaatttgcatatgttttatatgtactttactatgttttaaaggatgaagatttaacaaaacaatttttagttaaaatgaaagatgcaatgaatagatttacaggtaataaacaaattttcccattatgttatgaaacaagttggggtggtatttgttcaacaggcggtatgtcaaatggtgatacaggtgttgattttggtaattctgcttataatgatcatcattttcattatggttatcatattcacgcagctgcaattattgctaaaattgatcaattagttggtgatggtagttggttaaataataataaaacatgggttaataatttagttagggatgttgcaaatccaagtgagagtgataattatttcccaatatttagatcatatgatttttttattggacattcatttgctcatggtataacagtttatgcagatggtaaagatgaagagagtagcagtgaagattataatttcaattatgcaatgaaaatttgggcacaagttattggtgataaacaaatggaaaatcgtgcaaatttaatattagcaattacaagtagatcaatgaataattatatgttatatatgagtaataattcatcaattccatcaagatttgtaccaaatcttgttagtggaattaaatttgagaataagattgaacatacaacatattttggtacaaatgcagaatatgttcatggaattcatatgttaccaattacaccaatttcatcatttattagaaaacctgattttgttaaagaggaatgggaaagttatttaataaataagattaatggagttaattcaggttggaaaagtattttaatgttaaatgttgcattatatgatccaaatactgcatataattttttcaatacaaataattttaattatggttatttagatgatggattaacattaacttgggctttagcttatagtgcaggtgttagaaattgatttttggtattaaaaaagaagggttaatgattagaatgcttagttaaggttgggttaggatattgatttagtaatgttttgtcatttgttttatgttttttgttctttgttatgttttatgttattttctttgttatgttctttgttttaattacactctaactgtatagtctacacactttaaaataaactgtacagtaaatggcttccgatatattaggagagagataagggaaggagatagcgaagagagagagggggctcagtaatttttttttctgaaaaaatttgacagggaaaagattagcgaggttaatagtgagatgaagtcctcggtaggagtttccactggggaaatgtgtcaggagagccgtttctcgcttagattatcccatttactgatggtttatcgtttttgcaatctgtgatataaaaaggatgatgatgttcttaggaaacatttaatgagtgaagttactatgaagaggtttagtttgtgacctcttttctttttctttcttgtatcctttcccttatttaagtaaagttaactaagttatcgcaacacatgtatagaaacacaatactaagaagatccaatcttcttttatcaaaaaatttgatttcaacagcaaatagatcgtcaataatgattagatcaagattaatttcaagtaccaatggcaaacaaaatgtttcaccaactattttaaatgattctattcctaatgttaataccaagacaactgctaatactgacaagaatgataattatttagatactttaaataataatgaattatttggttatttagttattggatttgcaacaattaataaatctattttaaatttagttattaaattattcccttatacaccattatggattattaaagcattagtttatcaaaattattgtggtggtgataatttaccacaagttttgaaaacaggtgaaagattagctgagagaggtattcgtaatatgatgatttcttatacagttgaagcatgtgatggtaaacaaatgtctgttagtattgatacaattattgatgaaacaaagaaaagtattagtaattgtttagctccacatactgaaaaaatgattaaagaaaatttaattaatgcacaaaatgaaattgaaaaagttaaattaattaatgaagttccacctggttatgttgcattaaaaccaactggtttaattgaaaatgcagctgaaattttattaaattatgaaaatccaaaatttcaagataaatttaatcaattagttaaaagttgtgaaagtatttgtgatattgcaatcaatgaaaataatttattaaaagttaagtatcctcaacgtcaatcaccatttgttgttattgttattgatgctgaacgtaatgatttacaacaaggtgtttataaattacaaagagatttaatggctaaatataataaaggtacagcttatattgttggtacagttcaaatgtatttaaaggaatcttcaaatattttaaaaattgataatgaacttgctcaaaagggtggttatgttttaggttggaaattagttcgtggtgcatatattcatacagaaccagatcgtaatgttattcatgatacaaaggaagatactgataaaaattatgatttaggtatttcaaatacaattaaaaatatgaatagtgaaaatccaactgttggtcatttagttgttgcaagtcataatggtgaaactcaattaaaggcaactgaaattttgaaaactttaggtgttaatgaaagagctgaaaaagttcgttcaaatgttgttttaggtcaattattaggtatggcagataatattacttatgatttaattaaaaatcataattcaaagaatattattaaatatgttccttggggtccaccattagagacaaaggattaccttttaagaagattagaagaaaatggagatgcagttcgtgcagattccggtttcccacttgttaaaggtattttctctacgtttatgaagaaactcttttaatcaattaatcaattcatccattcattttacccctttttgctaatatttaatgaaagctcttaatagttttcaaattttcacttctcctcctatattttatattaatattaatatttatttaatttattttaaaaccaattgtaacattttaacctctagatatagtctgtaaatatagataattacagaatgtaattataccaattaagaaaagaactataccagacatgattaatcttaccgctctcatccttagcaagcttatcaagatcctctttactccaatcattgataacgtttaaagccaataattcttctgaccatctaatagtagcttctctaactgcataaaaacaatcttcaccactaatataatgccctgaatgaatgtaacaccttttgtataaatccaacgcagttccagtttcatgtactatcacagctgttaaaagcattacagcacgagttttagtgtataatctatttttaattaaatcaattatgttagttttatttttagttgttgttgttgatgtgtcagttgttgctgaagcataaatatcagctgaatcatcactatcacaactttcatcaacatcatcaacatcatcaacatcatcaacatcatcaacatcatcaacattatcaacattgtttttacaccaaccacggataacatccatagcatataattcgacacaccatctaatagtagctcctttaattgcataaaaacaatcttcaccattaacatacctccctgaaagactgtaacatctctcgtacacatccaacaaagtacccgattcatatgctaccccagccgttaaaagcaatatagcttgaggtttagtcatgcatgacttttgttcaactatgccaatttcggtttcaatttcaacttcagtctcagatgttgatgtatcaatctcggttgttgctgaaacatctgcaaataccaaacttaataaacaaaatatggtaacaaggtaaagcttcaatgataattgcattacttaaaagaaagaagtagatataaaatactgtattaatcaaatataagtggaattgatggtactcttgatgcttcaatgagataaataaggttttcgagattacgatgtaaaattctatatgataaaatataagagattatattcaacaatgaatttgttataaacagtgataaataccactcttcttaaacaataagtaaaagaacaaataggtatagttatatggttataaattgtagatctattgatgttatctatatgtagttaatgtaggaaaatcactaaactataacttttaaatttctagtattttgatgttgatcagaaatctacttcatttgattttctcattcttattactgctattattgaccaaattatgaagtccacttcaataaatttgttcttgttagtatcaattctattacaggaactctccttctaatcatattattttatatcatgatctagattcttgtattcttcaatataagttaaactggggttcaaatactgtttcttgttattatgctagcggttctaatactctttcttatcattattaatatgactcttatcattatagtagattgagttcattatcaaaacatgccatcttatctccgtgttcaggtgcatactttacattagacccacagtaattacttgatgtatttgttcaaaaaatcttggtggaaatcacttttcaatgtatcattagaaaatctatctttctctgacacaactttctctccgtattctttcttacttctacgccatgattttctaacaggttttgtaattttattatcttcattaattaccaatttctctttgttcttggaatctttaaactctatttgaagttgcttttcaggttcttgttcttgttcttcacgatttttctttagaagttccatttcacgtaaaatttcatcttcctcctcatcatcatcatcactttcatcgtctccatcatcttcattatcactaatattatcactatcacttccactttcaatttctttacgtaatgccaccacagtagttgactcaaccccttctatcttccttccatcaccggtatcttcatcattatcatcctcttctacttcctctttttcgaattctgcatttttattagactttttcgatctaaactttaatttcgaatgtgatgcaagtgatcttttatgtgaaatggaagacacaacactcttctccttccccttggcatgatcaaacgtaggtctagcagctgttgtcattgctactctatacctttcctttataaaagaagctgtagcagattgtaatatttttttagttcgagattttcattaaatttattgcatcgatcgagaaaaggcttttatataggagaagtcttttgacttaaagaaaggtttatatattattcagtagagtatattaatgtctatattagaagagaaagtgacacaggatatgactgatatagatggaaataaaagtgatggagaaggaatagataatacacaagatagtcaagatacagagtttataatcaatattaaggattatggatatgaaatttcagatcctagacattttggcatctatgatgacgacagtgaagaagagggtgaagaagtggatggagtggacgatgaagaggatgaatattattatgatgaagaagaagaggttgatggaagttatgaaaatatacagcattctggaatgttcacaactaaacatgatgaaaatggattaggacgatatactgataatatggaacaattatcacattcaacgagtaatgtagtaacagatgatacatattttgcacaaggagatggtaataatgataatgaaattttacatgcagttgcattatatccatttgtacctgaaaattctaatgaattatcattagttcctgatcaattattaataattaattatgaatgtggtgatggttggttagttgcacatgatcctgaaactggtgaaactggtcttgttccaacagaatatattaaaatgttagaaggagaaccatcttttgatcaattagataacgcaacttataatgaatttgctgaggatgcaaaggatgctcatagattcatgcctgaattgttaggtaatgatgatgatgaaataccaacggataaattgaataatttgaatatatagtagagaatagagtactaaaggaaggaaagaaggaaaatgtccaagaatacacagtcaaataggacaatccagtgaagtataaatattattaatacatgtgtgttaaattagtgtctctaaatatgtgtaaagttagataataataacaataataataataacaataatagtaaaattgaatatagatattatacataaaagcaacttagttttcaggaatttcatcttcccaattattttcatcaattcctgaatcatctttctccttaagtaaaaatccaccaactttttcaagtaatgatttaattgttgattgtaattcttcatcaatttgagctgcaagttctctatcatgtaatgatttaactgccgagcttaatgctaaacgtgatgcattaataaattcaaaacttttatcatcttcattaatatttttatttaatgtataattttcaaattctctaccaatatttatagaattttcctctgatatattgttttgtattcttattgcttctaaataattagagaaaccttcaacatacattgcctctacaccttcctcattaatatctcttgcagatgatgcaatatttgatgcaatttcaaacataccacattcaattgcatattttgccaatataattaatggttgatataattcaatatacatcatttcaacttcatcgggatcaatattattatttaatggattattagcaatatcctctaatgattgctttttcttttgaaataaatcccatgaaatattaatttcatttattgcatcttgtaatttttgttgagatatacgaacacttgcaattattgaatgcgtctcaggattattaaaacacatatctgataatgttttactccatttttcacattcttcctcagcttgtggtaacatacataaatcagtcatccaaatttcaattatagctgaaataccttgtgttaatttactaataatatattcacttatcttttcttcactaccatatgcttgtaataatattttaacaccttcatctaaattttcatcattattaatttctccagtacttaactgattgtaatatttgtgcttgtttaattaatcttgcaataccaacttctaataattgaacaccattctctccacctataatttgaccctaaatggaaaaatttctcaattcctttatcagcaattggatccaattcacatgctttggataaaactgtgaatgcagattcaacatcacttgtttcaagatatgcttcacctaaagttgttaaaaataatggattttcagaatatgtctgttgataaccctttaaatcttccaatgctctctctggatcagttggtaataaaactgacgcacgatggaattatatttaacaatgcactatcagacatcttcccctgtatgtatgtctattaccaatacaattaaaaatcactacttaaaggttttataatttaagtgaaaaataaaaaaaatatttttttttcactaagttaagcaatgttaactatgggaaactcaaaaatttcttccacagccaattcttcaatttagacattaggacactggacacttcttttgcacaattcaactatggataacttagaggaacaacaacaggaagttggaaatcttacagtccatttatccggatgaattggaactgttatcttctaccagatttcaaatcaatatacttactagacactgaatctacaaggaaacatgcagtactgctagatgtcacatatcctgaaacatatcctgaaactgttccaatattgaatgttcttgaaggttatataggtggtgataatgatgatgatgatgaaagtagtgaagatgatgatagtgaagatgaagatgaagctaattatgatgatgatgatggtcaaactatgtcaaaaaaattattaaatttaattgaaacaattaaattagatagagatgattatgatatacttctacgaaaaattagagaagaagcagaggataatgttggtatgccaagtgtattttcattagcttcttcattaaaggatcatgcagagactcaatttatgaataaatttaaagaaagtgaaaaggataatattagatgctagagaagctcgtgaacgtgaagaacaaaagaaatttactggtactaaagttacaactgaaagttttgctaaatggagagatagttttagaaaagaattaggtatagataaaagacttgatgaacgttatgcaggtgttcataagggtagattaacaggtaaacaaatctttgaacaaggtttggcttcaggtgaagaattagaggatacaactgatgcaaaggaatttgatatgtctgaattaaagaatagaatatcaggaatttctatttaaattataagttaattatatttaatattacaatttgttactagtatatacaaatccttacttatacatacttttcttttagtttaaacttaaattctgtactatttaataatcattataaacatgcttgaaattttcgacatcttcatcattaacaccaatatctatacctgtatccaatattctatcaatattgaaaacactatcgtgtaacattctttttgacatcatcatctgcaaagtaaggtaatggtccacctgatgatgatttccaactatcatcatcaattattggaccaccatatttaaactgtgaaattacatctgcatatattttatcattggtataattatcttcactcttggatgctaataatgataaatatagattttcatatttgatacttttctggtaatcatttttattaattctttgtttcctcatcgtctattaatgcttgtaaatactcatgtccctttgtagttaaatctatatttttcctatctactctttcatacttttcattaattttctcatctggaactatgaaaggttcatcaaaccatattctttcatgatatgtattatattcatttaattgatttaataaatcattattctcgtcttcactatctgattctaaatcatcaatattttctgcattttctataatttgagtaaagtattctgaattctcgtcatcggcatcatcatcatcatctccatcatcatcttctgaactatattcagttgtttcatcatcatcgtcttcttcaacattcttaggtacatcattattaactgtttccaattccacaacctcatcctcttgatactcttcatcatcctcttcattatcctctttttcatcattaacttctttgtcatcataaatatcaccaaatgctttcacaaataatcttcttttataaagcttcttaccactgaaaaaatcatataacttttcggaacctttataatctttagaaaattcagctatttccttttccatatcttcttcagttatgactaaaccatatggattgcaggcatcaggtacagatacatgtcgtggatgcatataatcaagcatttttttctctttcataattaagacaggtaaataattatagttatcataatcatcatcatcatcatcctcgtcatctccataatccttatctatgcgaacaatgtcttcctttgtttttacatattgaatgtctaaattattggaatcaaaaatatgtatcatactattgatatccttaactggtttaaaatgttttttcaaaccgaaccatgaaagttcctgtgtatctgtaaatccattgattttatttattaataattgttgaattaattcacgaatgtaatcatagactaaattgtacaaatcaatagttatttgttcattcattttagtagaatctattccattgtaggctttatttagctttattaatatcatttaatattggtaacatatcctgtatatgttccatattgaaaaacttctttatttccttcttaacagttttataattataacttttctcaaattcaggagtcattgcaaattgttgatcatctaatatttcaatactttgagcaaattgatcctccatttcaatatatttctcactcatttcataagccattggcatgtcttccaaactaatcaatttatctttcaattgatcatctgatttatatcgtttcaattcctttgataataaattatataaattaacgacatcaattgttgatttttcaggcaacaaagcagagatatcatcagctcttgaaattccataccttgctaatgcttcataaaaaatatctttctcctgacttgtccattttaatgaagatttgaattccaattcattatttgcaaatgaatcattattgacgtatataggttcatgtttaatatgtaaatcaaaggtttcaccaaatgcactatctaaatcgaaaaactcattgaattctttagttaataaattgaaatattgtaaactaacatcttgactaccggcaattgaatattttttagcaaatgatactaatctttcagctaatgcattatccatctctctttcacccctaacagctccaaaatatatatgatttaacaagtcaatcaacatcttcctatactgtatagcagttttagaaacttcaacaatattcaatccaggtccaatatttgtccaaacctgtcgatccattggtgtaaatctatattcatctttgaacatttcccatgttttaaactttattctatggatattcttagcaaattgagtttttgtctttttcaagaaataattcataattgataccaattgtccacttaaatcgcaataataaaagtatccaacaagtggatcttttatcatattcaaacgtaattgataatcatcatcgtcatcaaattcaattggtttatattctatttcatctatattaattgtatctgtagatttttttatccttctcttacggttaggcaatgattcttcttctatttcatctcttggatgtattcccagcactgtagaattcccagcactgtcatccaccaccatttatatacactttttcttaatcaaaaaaactagtcttataggactgcagacagatctctttttaaagatttgagaatttttttttcagtttccgtttcaacatgttgaaaaaaaattattaccggatttcttcactaagtgtaaagtataggtgttgttatatattaatcatacgggcaatacgatgttgggtcgttgtagagtattgggtagacacagaatacctgttactaggatttcaggaaatttttatgtgaaaagatggaattcaacgagtaatcctattccacagcctattgagaaacaaaaaaatgataatgttgaaggtgaaaattcagttattgaaccaatagaggatatcaaggaatttaccaaggaagaaacagtaattgaaagtaaaagtgaaatcaatgatgatgatgagatactgaaagtgaatgacttcaaacatcgtcaagagattaaaccacagttaatggatttaccatgggaagtaccaactaagaagagtgaagaaattgaggatgaaagtactaaaggtggattaccatgggaagttaaggaagataatgaggaaaatagtagtggtgttaataataatgaacatgttgaagaagcttttgatccatcaaaaaacgaattgattttagctccattaaagaagaaatcatcagtaattcaaaaattaaaaccacgtaagagtatttatattaaagagacacaaaagaagaataacgagaatttaagtttaaatgctgaacgtaattataagaatttaatgcaatttaaattcaatgcaaatcatgatgattttattaaaataattgatgaattaaaaccagtaaataatattgttacaattaaacaattaactgatatttcaacaaatttagataaatcttttagagataaacaaattcgtgaatatttaacaactaaagtacctggtattatattaaggaaatctcatacaaaaaagaaaatgattaataaattaatatctgaatattggaaattaaaagttacattagatacaactgcatgatttattatgtgagacaagaattgatttatctaataaaagagatttgtttttactattaagtaataaaggattcttacctcaacattggtcattaattggtgcacaattatcattaggtaaaacaacaaatgaattatacgttaaaggatctaaaaatatagttaattttgtttctgcatcttggaatgatttattaaataatatatcaacagatcatattgatttaacaaagattaaagaaatatatagtaaagttggtaaaaagctagatattgaaacattacaaaataaatgtggagttcattttgataaagttacaatgaatgaaaataattatatattatcagctattaagaataattcaatatcctgatgttaaaattgagttactgaaaggctacctgaatatagacatggtagtaataatataattattaatgaattacttggacagagctaaaattgaagatgaaaaattattatataagatggaaattaatgatgaaacacttaccatggtatattaaacctgaaaattatttcaggatatgcaatggactaaaccaagaactaatcaaagtttattgaatgatgctaacgtatttacagatatattaagtaaagaagttcaagatttaaaagttgaagttgaacaagcaaaggagaaatttgagtataattatattcaaaatagtagtaataataaattcaaggaagttaataaatatgatgacaaatttttccgtattgaaagaggagatgatatattattaaaaaaagttgatgaagatttaaaacttagataataaaataattgagaaagaattgaatgatgttaaattactaataatccctaaaagattaatgttagataatgttatcaatgttaaatttggtaaattattacacaatagagataataataatgattattattttaacgaaaatttacctgaatgtattagaaatttaagtaaactagaattaatggataaagaatcaagattatttggtgatacaggtggtatcatgaataaatttaataaacaattatatattaaattaatacctaatggattttggaaagatcaaatagataaatttattaaatatccaacagttgaattattgattgatttaaaggatggtaaattagaagttaataaattttctgcatttataagtgaattcgagaagaatattagtattaatttaccaaagttagatgttgacttaaaatttcaaaatagtttgaattctatgcttgtatataataaagatcaatggatattgaatggtagaaaagaggaagaatttgaaggagatgaagttaatgaaactaaggatgatatagagaaggagaataatgataataatattattaagaataagaagattattaatatgtttatatcacaagttggtaagggtagatttgatattaaaaggattgatggattacgaggggtaattagacaatttcaacataaaccatatttattttattttgataaagagaaagaaggtattaaatattgtgcaattgaagttgaatatttaaagagtattgaattagaatataagggatatccagtttcattaatattaaaagataatggagaaactgaaaaatttgaaatttcaatggttaaggaaggtaatgaagatatgagtaaatttatagacactagtttatcattagctacagtattatcacaataataatgtattatgtatataggatatttaatcttagatagaaaagattaagaataaagatatgagataagagatataagataggagatagtcatgtataagtagtaaatgagtatcttaggaaggctcagcatcatttttgctcttcttcactatcatcgtcatcaatcttcttcttcttttgtttcttttatttcattatttattagcatgttatatactcgttaaagcatgacagtgacggtaccacctcgtagagtaatatcactcaattaggtattcgtatccgtatgtatattttcaccagcttttcaattttaacaagatttattactaaaaataatacatatgcctataaagagtttacttcatttactgtgagtgaaagaattataatattgatttctaatataatttagcataaaatacacaacctatattaattaaatcataatataagtctaattattataaataagaggtaatgtcctcaatatgttctttaactaactttttgtaatgtttgtaaggtgccgaaagcactattgattctaacactattaattataaaaactcattatcctaagtttatcttaatctaactactcgcataccagttccatcgacactgattcgcatagtagtactcattataaatcatataacaattataattctttattgtattgaaaaagattcaacataagttataataattgatcacgtaatattttacgtacactatctacaatatcctcctaatgcttagcagtaaacaaaccttggaaagattttaaacatgaataatttcctgttattgatggtgatcttcatgcttttgatttccaaattttaaaacataaactaactccaggtctgaggatgaatcctaaacgtttgaattctgcaattcatcatgctgaaagttcgaccatatattattataataaatacaggcctaattcctaccctaagaattgtagttttattcagatatatagttagtgaggagagtatacactctcccgatgaaaggactgaaagaataatagaactagaggagaacccgtcccatcgacgccaacaagataaaacagacgcgtctatcaaatactatacattacgtaatacatataatacttttttatatgccatttcaattccagtttttcaaatggaagttatttttattttttaagtattaaaataaattttggtgaacatcaccttaagggcttttgccacccatttcaattttatttattcttctactcctttctcttttacttcttttatcaagcaattgcctcaattacttaatattaaaacaatgtctactactttctttgatgtcgcagctaatggtcaaccattaggtagaattactttcaagctttatgcagatgttccaaagactgctgaaaatttcagagctttatgtactggtgaaaaaggtttcggttataaagattctatcttccatagagttattccagatttcatgttacaaggtggtgatttcactaactttaatggtactggtggtaaatctatctatggtgcaaaatttgctgatgaaaattttattcatagacatactaaaccaggtcttttatcaatggcaaatgcaggtccaaatactaatggttctcaatttttcattacaactgttccatgtccttggttagatggtaaacatgttgtctttggtgaagttactgaaggtttagatgttgttaagaaaattgaatctcttggttcatcatctggtgcaactagaactgaaattaaaattactaattccggtgaattataaattatttaattatttaactatttaactattaactatttaacactttatttaatttattttaataattaacacatgtggttaactcttgtccatggtgacgtatttttcaattttaattttaattttccatttattacgtaatacattttaaaaaaagttaaaattgaaatttttcaccgttttccaacatgccatgattgaatcattactaagagtcattataaaggatatactcatcttattctattttcctatagacaaccatggatttagtaaatcatatgactgatagactgttatttgcagtcccaaagaaaggtagactttatgaaaaatgttataatatgcttaaaggtgcagatattcaatttaatagatcaaatagattagatattgctctttgtattaatttaccaattgcacttatatttttaccagctgctgatataccaactttcgttggtgaaggtagatgtgatattggtattacaggttatgatcaagttatggaaagtaatgttgatgttgaaatgggtatggatttatcatttggtaaatgtaaattacaaattcaagttcctcaaaatggtccttatcaaaatccaaatgatttaattggtaaaacaattgtttcatcatttactagtttaactagaaaatattttgaaaaattagaaggtgtccctgagggtggtaatttaaagactaaaattaaatttgttggtggttcagttgaagcttcatgtgctttaggtgttggtgatgcaattgttgatttagttgaatctggtgaaacaatgaaagctgcaggtttacatgcaattgaaacaattttagatacttcagctcatttaattctctctaaaaatccttcacatcctgaattattagaattaattcaatcaagatttgaaggtttattagctgcaaataaatatgttctttgtaattataatgctccaagggataaattacctgatttattaaaagttactccaggtagaagagctgcaactgtttctccattagaggatgataattgggttgctgtttcaagtatggttgaaagaaaaggatattgcaattaaaatggatcaattaaagaaattaggtgcttctgatatacttactcttgaaattactaattgtagagtttaatttgttatataattattatattatctatattacatttatactatattatatttacatttaatattacattactttataaaacaataaatcagtatatcaatataagtagagattatagtaaactctctgaaactaggcgcaacatgtttctatttttttttgatgaaggcaataatcctctacattacccaatactattttctttaaacaattgattgtaagtagacaatcactaggctaatgtcttcaccctttgacaatccatcttatttagcctcttcttcttcatctaattctacaaataatataattaatttccaaaattcttcaggtaatataaatcaaacaagatcaagagaacaaagttttaatcaatcaaatttagatagagattttgaagataatttagattttgctttaggtaatatagatcattcggaaaatccatttgtttataatagtaataataattcaattgatcatatagattcttattcattgaaaagtttacgcctatcaaattcccattcaaattcacaaaacaacataattgatctaaatatgcagttaaaatcaaacaataaaaataataacaacatcaacaacaatggctacactgattacccctattcacagacaaattcatcaaattctttatggtcaaaaggtgttaaatcagtttataatacaacaaaaagattaattttaaataataataataataaaaagaaaattcatttattagaaactaattcatcaaatgatgattcagaaattccaatttcttcattagaatctcaatcaagaacaattatacctcatatggattcaatattctcttcaaatgctgtttcaaatgcaaaatataatgcattctcattcttcccaattatattatatgaacaatttaaattcttctttaatttatatttcttattagttgcattatctcaaataatacctgctttaagaattggttatttatcatcatatgttgtaccattagcatttgttttatcagttacaatgtctaaagaggcattagatgatataatgcgtcgtcatagagatagagaacaaaataatgaattatatgaagttttaggttcttcaaagccaattatggcaaaagatttaaaatgtggtgatttagttaaattacataaagattcaagaattccagctgatatgattttattacaatcaaatgaaagtactggtgaatcatttattaaaactgatcaattagatggtgaaactgattggaaattaagaattgcgtgttcattaactcaaaatttacctgaatcagaattagaaatgattaaaattcaagctcaattcccaactaaagatattcataaatttttaggtaatattaaatatggtgataatacaattggtttaactgttgatcaaactttatgggcaaatacagttttagcttcaggtacttgtattggttgtattatttatactggtaaggatactaaaacagtcattaaatacttctttaccaactgttaaaacaggtttattagaattagaaattaatcaaatttctaaacttttatgtatttctgttttcatattgtcaattggtttagttgcttgtcaaggttttaaagatgattggtatattgatattatgagatttttaattttattttcaactattataccagtttctttaagagttaatttagatttaggtaaatcagtttatgcatatcaaattcaacatgatttaaatatacctgatacaattgttagaacttcaacaatacctgaagatttaggtagaattgaatatttattaactgataaaactggtactttaacacaaaatgaaatggaaatgaaaaatttacatttaggtacaatttcatatactggtgaatcaatggatatcgttaaagattatataaataaatttggtgaaatttcatcaaaaccaacatcaagaagagatttaagtttaagagtacgtgatttaattttaactttagcaatttgtcataatgttacaccaacaatcgaagataatatattagaatatcaagctgcatcacctgatgaagttgcaattgttaaatttactcataatatgggattatcattaattaaacgtgatagaaataatattgttttattacatgaagcaacaggtaaaacttttgaatatgaaatttatcaaattttcccatttaattcagatactaaaagaatgggtataattgcatatgataaatttaaggatgaaatttggtttcatgaaaagggtgcagatactgttatggcgaaaattgtctcacaaaatgattggttagaagaggagactagtaatatggcacgtgaaggtttaagaactttagttattggtaggaaaaaattaacaattaatacatataatgaatttaaaaatgcttatgaaaatgcaagtctatcaatgtcaaatagagatgttttaatgcaaaaagttataacacaatatttagaatatgatttagaattattaggtttaacaggtgttgaagataaattacaaaatgacgttaaatcatcaattgaaaatttaagaaatgcaggtattaaaatttggatgcttacaggtgataaagttgaaactgctcgttgtattggtattagtacaaaattaatttcaagaggtcaatatgttcatacaattgaaaaattgaaaaattatgatattgcattacaacaaattgaaattttaagatcaaatataaattcatgtttattaattgatggtgaatcattatcaatttatctaaattatttcccaaatgaattttttgaaatttctaaaaaattacctgcagttattgcatgtagatgtacaccacaacaaaaggcagatgttgcaattttaattaaacaattaacaggtaaaagagtttgctgtattggtgatggtggtaatgatgttagtatgattcaatgtgcagatgttggtgttggtattgttggtaaagaaggtaaacaagcatcaattgcagcagatttttcaattacacaattttgtcatttaacaaaacttttactttggcatggtagaaattcttataagagaagtgcaaaactttcacaatttgttattcatcgtggtttgattatatcagtttgtcaagtcgtttattcaatttcttcaagtttcgaaccattagcattatatcaaggttggttaatggttggttatgcaacttgttatactatggcaccagttttctcactggtattagactatgatgttagtgaaaatttagttacattatacccggaattatataaagaattaactgaaggtaaatcactatcaatgaaaacattttttgtttggctgttcatttcaattttccaaggttgtgttattcaaggtatttcacaaagttttattggtttagaagttacggcatttacatcattagttgttttatcatttacatcattaatattaaatgagttagttatggttgcattagaaattaattcatggaataaatcaatgctttattctgaattaattacattggcaatttatattggtagtataccattcttatcagaatattttaatctggaatatgcatcaagtttctcattttattggcaatgtgcattaattttatcagttagtttgttaccaatctgggcagttaaagcaattaatcgtaaattacgtccaccaacatatgctaaagttcaacaagtttagtaaaaaaatctgtataataatatcatatcatttaattagttatatattctattctataaaaataattaacgacttctatttaaattgacctagtttcactcatatcataatttacctctaaatcatcttcatcatcaataattctatcatcattatcgttcactaaattgagttcctctcttaaatcgtaattatcatcaatatcagatcctgtaatattaccattattattaatgtttttattttgatcacgttgttggaactcttttgcatgtgcacgagaaataatatgtgaaagttgttgccagcctgatgttctgatagctgaagttctttgagttgctgcactataaatactcattgcatcatcttgaatatcataattacctgatgtgcaaattgattctaaatcgatatttgagttattgttattattgattatatttgatggtgttaataatgcaattgtttcctctaattccattatattaatagttggtattgtaactctattacttaaaatttgtcgaattgttgtatttaatttcctttcaatatattcattaatatccttcgaattaattattttttgaatattggaaatataaggtaatggacaaacacgtgaaacacgaaataaattaacatttgatgcatgttcattctccattctgaaaaacatccaaataaatctacgtaataattcagcaattgcaacaaagaatgcagttaatggactatgtgaaatataatatggtgtgaaaacataaacaatccattgaaatcttaatactatatcaataaacatagcaaaataataaattggtttatgtttataaatcaagacatctcttaataaataattatctgatgataattgcattaatgaccaatccatgcaaatatcccaaaatgaactataaattgaattaataattgaaattaatataaaaataactgtcattgtaatattggaaggtttataattatatccatttatttgtcttaatgcttcatctttaaatgttgaaatacgataaagtgatagaaggaaaaaatatgatgtcgttattagatatttagctaagtttgcaaaatgtgggaaccattcacctgtatctaaaaaacgacgtaaacattgcattgatctccaaattggtggaatgcatgcacagatacccaaaatatgtgatttcattggtccacaagtaccacaatttgtccaatctacattttgtagacaaaacatcatataaatattggcaattgaataagttaacgaacatgttataactcccataaagaaatctctaaattcaacaggataaaatccactaagaagtagcctgaatattgaaacaataaaccatattcttgcttttaagtaaaaaacatttaatggacaaaaaagtattaccaataatgaatagaaataaatgtatggataataaatattatcaccaaatacatcacttatactccaatatgccataatacttccaataaataataaactggatggtataatgagaaattgtttataatctaatgcatcatgaggatttaattcaaaaactaatttgtaattgattttgtatttatcccaaacaacacaatttatagcaaatagcaaacctgctaaaacaaacaaaaaccaagacccccataactgtagaacaaatttcatattaggatattcattatttccgttttttgatattatctcaaaatgaaaaataataagaatggacatgaaataccaattaagtagccagatataaaatttgatctataatgagttttctggagttcaaatgaccttagttttgtgattgcggtcttacgatgtccatcctcaaatttttcagcaaatagatcttcaatggattcagctaagtttgaacaaaatatcagatttattaaagtacattgattcaactttattagtgtatgatgatagttttgaatcatgacattttttatcatatttcttaataagtttcctaaaagcagttttattaactattttatatgatcctaataactctatagaatgatataactcacaaattgcctttttgatcataattttggatataaaaggtggcggaggagtgtaacttttatcttttgttgataattgattcattttgactttcagtatcagattcaaaatcttgaatttgcttatgattattccaaaaataattaggcatcgatggcatttcaaagtgattaaatataaattgaatacgtgcaagaatggatactgttgataatgggttattaaacttgattttttgaaacaagctttttttgttactttttttatgttgatgacagttttgttgattgtttgttgattcatccaatactgtgctatttgatttggagagtttggcttgctcattttccaattccttcagttgatccaacaaactaataaatcttttagtataatcaagttctttatttctgtaaaatgtatccacttttagaagttccacatcaacccagcttacaaattgttgtttagcaagtttagtaatatctttattctcttctgataatttaggttgaggccctctcatatataatacactagttgaatgagatctatgatgttgtcctacattatcattcccctttctgataacggagtatctccttaaaagtggagcattctcattttcattatttcgaggttttatcttaaagtcaacttggtcaactaatgaaacaactttataatcattattctcatcatcattatactccaaaccttcatcactatctaaatctgactgagcgtcatcattatagttatctttatctaatgtatcagtagatccataatcctcccaggtctgcctaaaattatttctctcctctataatggactctctattacccaactgataatctgacttaccatcaccaccttctcgtacaaatacactatgtgaatcattttctgctaattcagaagcatctagaagtaaaggtgaacctcttaaagcagttttaggtgattttccatcatgacattggcactcagacgatgtctctaaaaacacagtaagtttatttaatttatttttacccttattatagtccaaatactgtgatctccattctgaaacaagttgatgttccagaaaatctccaaatttcatcctatacctctataacctgtctttgatgggtatataaatcaatatttgacattgaaaagaactattagtagcaaaagataagaaaaatagcgggtttatttaagcaaccaaaaaattttcatcttgtgtgtgacccaatagttatttaacaaaacagtcagaatactacaatacctttgcagtacctgtaatttaacaacaatatattacctttgaaacactattcaacagtctacaccaaacacagacttctacggagcaataaatacaccaactccgagagatgggcccctatttacatactaaatggaaacaaaagaagacgttgacgtcccccacatgatgtcaccgcacagcccgaagcgtcacttttttccatttccttttctatttccttttctatttctattttcttatcttatcttatagggtatatttatacagtatttgagtttatataaagttaattatcacggttgttatcatcaagtgcttcaccacctgcttcctcttcttcatcgtcttcttcctcaacttgcttttgattctttgtgactttccttctttgaaaatctttgatatgcgcagttctcatactttgtgataacttcttagcaaatcttgtcagtgataaaactacaccactagtgtatgccatatcaccatcatgtttatctccactaccatcacaaccaccactctctatatcatctgtaatattttgaccttcattattgactaaaacagttggtatgtaacttgcaggtatttgtgatgtttcattatttctatattgtacattttgatgttctgcatgtttagataatgcaggatttgtaatattaataccatttcttcttctaatattttgatctgtaatatcttcacttatatcattatcaccactttcttgatgctgtatggtatttttacgttttttagttggatatggtaatggtgattctcttgatgctctaaataaatgaacattagttgcatgttcattctccatacggaaaaatatccagacaaatcttcttaaaacttctgaaattgcaatacaaaatgatgtaattgcactttgttgaatttgctttggaaataaaacatagaatacccattgaaatctaagaataatatcaataattattgcccaatagtaaatttcaggttttttaaatgtaatctcatctcttaataaaaaatgtttagaatcaaattgaaataatgaccaatccattacaatatcccaaatagttgagtagattgaattaaatgatgcccaaaatattaaaagaattttatatttactgattgtttcaattctgtacaatgataatgacatataatataatgtcgaaacactatatttacccatatttgctaaatgtggaaaccaatcccctgtatcagcataacgtctaaaacattgtaaaaatctccaaatagatggaacacattgtaaaaatcccagtagtctagactcagatgatccacatttaacacaattattccaatggttaccgtatatacagaaaaacatcgaaacatttgaaatagaatatgttaaagaacagaaaatatcacccaagaaaaagtctttaaattcaacaggataaaatccacttaataataatcttgtaaatgttgataaaagccataatctagcatttaagaaaaacatatcaaatggacacagcaaaattgccatactgactgctaagaataaccatggaaaatcatatccactaaaagtgttaggccagaaatcatggaagctcaaccatgcaattatccctccgaaaaagaaaagtaaacttggcaataccatatattgtttgaaatctaatgtatcatgctgattaaattcaaatataaatttatagttgactttatatttagtccacactaaacaattaattgaaaaaagccatgccattaacaacattacaaaaaaaccaccccaaatctgtaataagtatttcccattgatgaaataaccggtctgtgttctatgaatacccacaacaaatgctaatatgacaaaaggaatagcaatacctaagaataaacccgagaaataatcagaaacatagtaagtcttttcaactgcacttgttcttaattttgcaatagaaacttttctattaccgttttcaaaatatcttgtatacagttcttcaacatttgtcattaaattatccaatgtctcagatttactgaaataagagtcatcaatttttttcatataggtatttaacaaggaatcgtttgtagttttatcatattttttaattaattttctgaatgcaattctattcattaatttataggattttaaaagttccattgatctgtataactcatatactgcttttttaatcattctgcgagcaacaaaatatggaacaaccggaaggtttttcttttcttctttggaaatctctaacatgcgcattagatgatgtaggtacgtccatgtggatgtgcatgattattatcaccatcctcattatcttcatcatttgaaaaataaccttcttcataatattgtttttctattttaccaccgtttttcagccattcaaaagctgggagtgatggcatgtcaaatttattaacgattcttaatttccttcttgtccaaaatgaaagtaattggaaattacgctgtgctgaatttataacaccattagttaagtgtagccatgtttgaatttaaataatcctcatagatattatcatcgtcatcttcatcatcttcatcatcttcgtcgtcgtcgtcttcatcctcctcatcatctatatcataattatcaacataattcctatcacctatttgaaactcatattgggtgaaagattcccgtttgtgctttgtaaacgccttttccgttgttgccatttctttttggacaatgccttttgattttctaattgaaacacttgatcttgtaaaactaaatatctttcaacacaagatttttcacgttcttcataaaaactttcaattttattcaattcactatccacccattcaataaatttctgtcttgcataatttgataaatcttccagttctgtatcattatcactttcataagaaaatgatcgattccttctaaatgaatcaaacaatccaattacctgatgatcggacgctgcgatgccgataagtttgaagtattgctatgtcggtgtagataatcttgactttgagccaggaagttctggtatttgtatcattaactcctagtaatggagtcatatcgtgagaagggatattagcaagggaatgatgtgtcaaaattttaggtgactccaaagagctagacccatatgattgtccattgataatcctaaagctgccccaggtaatgcaaatgaggtattgctatctagcgtaagttgatcttcaattgcattcgttttcactactgataacgatttatcattattattctcatcttcatcatcatcctcagtaacgacatttaaaggggttccgaattattggagttttcccaagtttaggaagtaggtgtcactagttctctctaacgggcttgcattgctacttttccttgatcttgcttttgaacttgcctgtgattttaagatcggagttgacttcaaactattcaatacactaggtttctgtcctaacttttttaactttttttttaccagctttataatcaagatactgagctttccattcaggaaccatatgggcctctaaagattgaccaaacttcattgttaattgctatagttgttatgaattgtcaatggaatggcaaagaaaaattaaaatatttaagtttgatggtctcaattaaaactggagaaaaattaatccccccatgcacataaaagttaattgattagaatgtattcttctttattgcaattgaagattactctttaacaggatcaaagatgtcatcatttatgttttttgattgaataatatatggagtggagtgatatgttataataaaaatacaatgattaaatgccgtatggtatactatatagcttaaagaaattaaaaagttgaacttagcatatagacatttcattcggatataatcggttataaaaaaattattcaaatatttttttgtttttttattaaattaaatacagatagagataaatagatattaaaaaagagataaaaaaggaaaattaaaaaagtaaatcaaaaaggaaaataaaaaaagtaaatcaaaaaggtaaattaaataaaattgttaataaatcattaaattgggaacgtccaaattgtaagaaagcatcacatagttggatttgttagtaaattgaataacaaactgaattaaaattcagcttgtttataataataaccaatttgttgttttggttttggtggattttcttttaaacgttgttgaagtttattataatcatcaaattcagttcttgttaaatgtgcttggaaaggtttataatgggtatataattcatcaattttttccaatgtaagattttcagtttctggaaccattaataaaacaaaaatcattgctgcaaatgttgcaccaaagaaaatataaccataactaaatcttaaacgtgaaacaattgctggtgtgaaagaatgcaattaagaaaccccaaatccaatttgctgcagttgctaatgccatacccttagatctgactcttaatggataagtttctgaaacaacaacaaaaacaccatggtgcccatgtaattgcgaaaaccataataaacatacatgtacaccaaaccattgcaccaccaacttgttgatcaactgcttgatcataaccctttggataaagaacagttgaaccaattgaagcaaaaactaaaagacataatgccattgcagctgcaccaaagattaaattatctcttctaccaattttaccaacactgtataatgcaataaatgttgataaaaagttaaccatacctaaaatgattgatgtaacgaatgaatcttctaatccaatagatttgaaaatagatgtaccataatagaagaaataattattacctgttaattgttggaatgattgtaatgcaacaccaataatgactctggtgagaatttgagattcaccatcattagagaataattctttccatgaatgcttcaccagcttttctttgttcaataattgaagtttcgatttctttgaaatcattagcaacaacctcatcattcaacatcacaattattgattcttgcaagtgaaactttagcttctggaattctgttatgttcaactaaaaatcttgctgattcaggtaaaaatgacataccaacaatcatgaaaattgcccatgcaaaacataaacctaatggaattctccattgtctagtatcagtgaaactatggacagtaccaaaagttgtaacataaccaagtaagatacctaaagtaatcattaattgataacatgaaactaaaacacctctaatttcagatggagaagtttcagcaataaacattggtgataaaacctgagactgcaccaactgctaaaccagaaacaattctaccaaccatatattgaatccaatgaaatgaagaaatttgtaaaacaataccaacaatataaacaaccatgacagacattaaaccaatttttctaccataagtatcaccaagttttgctaaagtgacaccaccaattgcacaaccaatattgaaaattgaaataattaaaccaactctagtattagagaattcatattcattagttaatgaatttaattcaccaaatctttctttaaaattagacatttgaacaaatccagaaatggtaccaggtatcccaaccgaaaacaaaaccaccaaaggcaactaataaacataaaagtgaaacaagagaatgtttctttaaaagacctaataatttatttttaccattttcctcaacagattcattttctgttgaaagttgtaacttgatcatcattttcttccttgatcatgtgctctgtgttttttatgatgttttttatgtttttgtttagtgccttgttcagcaatttcaggatgatctgaaagttcagttgaacttggaacaattgatgaaactgaagattcagaagttgaagatttagatgatgatacttcatggtaagttgaaataacgttaagagtggtatggttaactgaaatatctttttctgaaacagaagaagctaaggaagctgattcagcagtagacattgtttgaaaaaattaaattgaaggaaataaagcttgttgcttgagtttaagttttgattgaaggcaagagtagagttgactaagtcttgcgaaatggaaagcgtttgctataataaaggaaaagaaactaataagaagaacaggaagaagaaagtgaagagaagaagaaaacttaattttcctaaaagttggaaagttggtctccttttatagacttttgaatttacaggacagatccatatgactgtgatcttttcatatattgatctactacttgattacctttgatcactcattaactataaattatagtacagaacaccaaagtagaaggtcatacttacctaatcgggaaataattctgtatttttttatgttgagagactgcgccacgcgcatttgcctatataaaatgggaaccgcaccgccgctgtacagtgatttaagtcatttcagttatttaagtagtcatcaaagtaaaacagatcaaagcaaatagtaaaaacgagaggtataaccagtcggatgctttataattacctttatacagtctataataagtatgtaaaatatataaattaacgttcaatgatgttttgttgaagcaaatcttcaaattgtctaatttcttctgcacgcatagtattttgcatgataccatttgaaatttgattatcatcaatgtagttgtagatagtggtaccaatagaaggaggtaagacatcgaattcataaactgagttatcagaccaaaaggattcaggtattttggccataactgtagattcaccagacaaaactgcatgtcttaaaatattttctggtatttcttcaagattgttccagtaatatgaacctaagttaggtttaccaacttttgtaataattgaacttaattcagtaactaagaaatttctaacttcttgatcttcacatagtgaatcaagtcttgttaagtaaattgccgtaattaatttaacagtatcattaacatcctctaataaccatggatgatcaaaattacctagcttttccaaaatactatgacctgtatatgagtgtctattatatgcacttagtaaagcatctttggctttctgttttttacccaatttcaaataacacaatgcagcagtatattgtaaaggtgcagttaaccaagcttcataacatcgacataatggtgattcaacaaggtcaatcagatattggtattcttcagctaaaaatgcataatagtcaatgaaaaatcttacaccatatggatcatcagcaggatcaaatgaaaataataatttacagtaagttaaagctgtatagtagatagatttttgtgtaaggacagaaatatatctaaatattgtcaaatatatttgtctattgaggaagtattcaaatggtaatcttgatttaccatttcctaattcaaatgtattaggtaaactccaatcaaatacaaacaatgctctttctattaacccattagtgttagagttatcaccttgtctttgtaaaatacacgctacctgtaaaatagtttcaatactatatggagatttttgaagtaaacggatcaaagattcatgatctggttgaacaacaactgacataaaaaattcagtggttgcagcaagtgaaaatgtaggacctggtgtgatattatagtatcttaaaccatacttatattctttctttatatcttctaaaataatctctttccaatcatctttgaattttgttgaatttaaaccagcaagatcacttttagacatttcttccatggataatggttttttaggtattggtaaccaatcatctttgattttagttaatttcaattttctggtagttccaggaattgaacgatgatctctaccagaccagccacgtatacgttttgcaagttttttaatttgtgataacatttcaggactgattgaacttgaagaagttgaatcagcagcatcaattgcagcagctgataatttaccgaataaattttcatattctctatcagggtttaaatctcttgaatcaaaggataataaatgtgaggatctatgaaatttctttggtgttaataatttaccaccatgtgtgtatattggccaaggaggtaattgttcttcattactatcatcatcatcaatatcagaaccatcatcattatcagaaaaatcacttaaattattggtatcattttctttatttgatttcaattctaattctctcattttatcttcaagttttgcatcagcaagaattttatccaattcattatcatcaatatcatcaacagttttagaattttgagttttattaaatttaacttgtttctttgaattagatttagtgttattaacaggtggagttacagatttttcttcatcttcttctaaactttcaaaatcttcaccagaatcttctgaatcatcatcgtcgtcttcgtttaagaatgcaaatgcattagttggtctagattgaactatttcttcctcagatttttcatctgatgagtctgaattagtttgaacaacagactttttttggtactttgctaattcattctctaaagtgctcttcccaagtttcctcaaagctctagaactcatctcttatgtctaatgaatagttacgaaagtaaactacttacaatctcttcttattcctttgactcaacagagactgtcgctgagtgaaaacctctttttatagaagattacgtaatatctcggaatagtataaagtactaaaggttgatacaagatcttttagtttaggatacaatatattgtatggtataaattttataaagcaataggagattaaattgaaattgaagcaaagaataataaatcttgaaaaaatagtttaaaaaagaaagagtcttagactctataattgtctaccaatactgtcatgagacaatgttttaaaatgataagcttcagttgaggtacaatcagtattcggatttgaaacttcaccatttggaccgtatatccaacaagcattttcttttatacatttaccaccagtgcaaccacattctgaacgttgaccgacaatctcttctttatcattaagtatgagagatggatgacgtgctggaattgcctggtctctttggaattggttcacttggaatgtaaatgttttgtttaatgtatgcaattctttcactttccatggttgactatttgatagttattcttgtagagaaagaaagatgataatatagatgaagaaactaatcaaagaagtgtataacagagcctttatttatatattgagaaataggtttgactcccttaagtattgatctatttcaaaataattaaatatatgatatttcaagaaatgtaatgcccttaaataaataaatgagatcaaatggtatatctgactcattttaaacattaaagtctagtattgtctgccataagcgccttaactaaggaaagataatacctagataaggaattcccgccaaaaattccgtgtgttacagccgtgcatatactaataaataaatcagatgagcctttttctcatttccaccattctatctctctgtacatggcactgacagacaccggatattgcaattgctgcatcacagtatacgtctccccctgaaaagctagagccgtcaacactattataattattattattggataatttaagacgcttacttgatggttcctcattaatcacgtcattcatatcatagccactatcatctgcacttagcatactcatattattcacctcatctggacgttcctgtgcaaaattttcaatacctttattccatagaacgccagctagccattcaagttccgaatcttttacttggttatcttcattatgatcaaccatttttcttgtatcttcgattttcttttgaaatgttagaatgtaatcaattaccttttgttggaaatatttctcttcaagtaatgaataattcaccagtaaataaatccatttaaatatcattctttcactgacttgaaattcttctttaaaccccctttcaaacataattgtgtcagataacattgctatttgatcatagtctactgatgtaaaattacgttgggatttattgtataccatttccatcaaattatcaagttgttcattattcatttcaatatctacaaaatcttcctctactgaaactgttaattgtttcactcgtttaatcacatctttccataattttctccgtataagactttcattaattattaaatgatgttgaaatattatttctctatcaatatcttcatattcacttaaaacagcaatttgttgaatattatcatcataaatttttttccacttctggtttatgccatgcatactagtgtcagatttatcatatccttcaattatctctctctcacatattccactgaatataattgctttactttgccatttataatagttttcttgattttccttttttaacaattttatcaacctaatgacacttgagaatagtttaaccccattaatatcaaatatttcgttttcaactaataaaacaccataattataacatatacttgcaaaccattcacaatcattttgcatttcactataatcaatttttgattcattttctttagcatactttatgaactggttaattgacttaatcatcatatcaacactttcgtcacaatttttaatatcattatcaattgttttaccataaatataaacacttgaccttaaagctaccaaaaataatgggttatcagtagtagtacccatagcatcacatttagttaacattttttcaattgcacaatttaacggtttatttacttctttgttatgtccattcgtattatccttactttcaataacacatagagccaataaatttattgattttggatcttcactatcacataattctgttaaaatttttattgcctctccattgctatcatccttttggttttccattttcaaagtttgaacaaatttataatatagagtgattgcatcttttttattgaattttgataacctgttaaagatattattgaacttatcaagttcttcaacttttaaacaacattgtagcatactacgttcaatttttccaaaaatttcatcattttgttcactttgatcattattaactttcaaaattctactaaagcaacattcaaaccactccaaagcttcattataatcttcttctttcatttttttcttgcccatactccaaagcaagtataactaagcagtttttggtctccttagttaattcaaaaactattttcttgtcagcaatttctaaaatattttcgacaatattcaacttctctttagtactttcaatcttaagttgtgacgttaccatccaaattgaagaaatcaaataattttcaataacttcattatattcagtatctgaaaatttaagtttattagtgaaaacatataataaacaattcttagcgattgtaggctgtttagatgaataagaattcaaaagcattctaattttctgtaagattttcaagtttgatggtaaagatattataaatttcatcataatctcttctatttcactcacattcaaagattgatattctagtaactcaagttgtagtttgaaggattcaactttttcagtttcttgcatctgtaagaatttgattaatttattagccttttcaatagactccttcgtatccaatttaatgcaacactttgttaaaattgttaatgtagaaacttttattttatattcaggtccactttctttgatttcatcaaccattttttcctataactaaataacatcgttcaagaaaataatatgaatcgtgatattttccctgttgatataattgtaacccatcattgaataaaattctacagatgttgaaaacattttctactttcatttttacacaattatcaaccacatttgccttagttttcataaaatttggccattgagatattgttcaaaaggaaggcactttgcatatccaaaataagaaactccatttttaaacctattcaatatcttttcatcttcatcatttaagttacaggtctcaataaatggaataatcttttccacatactctttaacttgctttccaacattgagatcctttaaatcaatacactcatagtaagttttaaacaaacattttaatgtaccaattttacctaaattaccgacattcatcatagtatagattgagagtaatagacaaacaaaatatttcaatttcatcactattgtgtaaaatccatctttccatgaataactttctttttcacattctttcattttcaaatcaactacattccatacagataatgatgatttttccaataaatgtaactttttggaaatacttgaatgaacagtttcatcctttaatttaattactggcacatagtcaatccttacgcatttttccgtggattcaagaactggtgttaatgtatccaatcttgtaccaatacacgataattcaaaagttgcatcgttgtttaccgttatattttcaagtatttgaaatgtggtatcacaaaatcctgtattttagagttagttaatgagttccaattgaaaataaaattagaaaaaaaatttctgggtcagtacaaaccaatcatctctgtgattgtagaaacaatctccacgtatatatccatgtctttggtttttgaagaagaagatgaagtaaatcaacattaatgatggcaaaaggaaaaataatgagccgcattttttcttgcacgtaatagtggcgagcaattaaatattgggcacctacagatttttcttttaataatttacgatttttgttttctaagatagttataaaatatagatgattatacaattaaagataaagtataccgttaagactggatcatttcttcttcaatgcttccttcataccaattaaacgtgtaacaccaggcatccattctccacattcattagtaaattctgctttaaattcttcacttaaacttttagccttaacaccattttcatcgactaaagcagtaacaatttcatttaatttagcaatacctgattgtgaaaacagatcacccgcttgtaaatgtttaataagaatattaactctcttttcagtatcaataacttgtttttcgaatttttgtggaatctttggtttaactttttcaatttcacttaataatgtagaaccaatagattgaacaaatgataaatcaactgaatcagcttgtggggttgctaatacagcagctgatgtaagagtttgatctgggaaaacaccttgagcgttagttggagttgttattggtaactcctcttgtggtttgttaaatgctggtggtgcttgagaacttcttcttggcggtggtggagcagatgagaatgatccttgtggtttaccataatttggtggaggtggtgcaacattggcattaaatgaattggctgatggtgggaactggaattgttgtggttgttgttgtaatgcttgtggttgtggttggtattgggaagtttctggcaaatagttattgttagcttttggagcatatggatttttaattactggttttggtggaactgatttattcatagaacctgggagcggtgatgctattctactcattggagattgaggacgtggaatagttggaggattgaatgcttctggttttggtgcatatggattcttattagttgctgcaattcttggtgtggttggtaaagatgattgtgatgaacttgagttttgatcatagacattcttacttggaggtgttggcatagctggtgcttgtgatataactcttgtacctgattgactacgattatgtgctagtggaaattcatttgatgcatttaaagctttaatttgtttatcttggaattgttgaatattagcagctggtgttggcttaactacaggagctaaatgagttggtaaatcattccatccacccatatcttttcttaatgaaggtggtaaaatattttccttctttgtttcaaaactatttgatggtgaaaaagctggttgctttaatgaatcaagtgctgtttttggtgcatatggattagcagatgctgccaggttagtgttggatgtatttggtgaaataatattagttggttggtatggattagctggagcttggaatgagttaatttgtggttggtatgggttataagatggagcagcagcactaacaggtgtttgatatgattgttgttgttgaatattagtggtagatggtgatgctgcaattgagtttgttctattagatgatggtggcggtgggacaattgagtttgatctattagatggtggtggcggtgggacaattgaatttgatctagcaggtggagcttgtgctaatggagttgaattcaaagatggagaagttgttggtaaaacatatgggttcctttttgctgcatatttgttagatgctttagatgtcgaaacgacagatggttgatcttgttgctgttgaacgggttgagaaacttgttgagaagcaaaatctggagctgaagtttgaggaaggacatatttggaaacagatggttttttaacatttggaatattagaaatattagtagtaacattatttgaaacattttggataaaggctttcgaaattctatttttttcaattttaatttctggaattgaatcagaaaccatgtttaataatttataagctaattcataatgaccgtagttaactaaggaatcggcatattcaacaaaaattttacctaattcaaatgaatcacttgataattcaaatttagaagttgattggaaaatgacaatcttttcgataacttcgcctaaagctttaaatcttgcttcaaatgcagtatttttagaaccatcatcattattagttgataaataatatgattcatatttagataattcagataaccaaatttgtgagactttatctaatgaatcagatgcgataaaacaagataatgcaaaatctctcttattctctaattcagagtttaataatctatcaccaagtaatctcatttctgaattgaaagatgctttaccagttgagaatgtaataattgaatttgcaatatttttccatgattcaatattagcattcttaacaatatcattaattgatttattacttgcactgtataataatctggaaaatgaatttttatctgcaaatttttggaaaaatgcattcttaaccttattttttaatgcatcagatgaatctaaggaaataattaaagcttccataatatgatctttttgtatacataagtcaattaaactttcagttttgttagtcaataataaatcaatagcagatttttcaaaatcatcatctttatcttaacatcaatttcaaattcaccttctggaatatattccttaacatcagcagttgtaagagtagatttattaccattgcttatttgattgaagaagtcatcatcatcaataatttcagaatctgcagcaggtgaaattggagaatcggatggagttgttatctctttttctaaatctaataatgagtcaactgtaccatttgataataatttttttcaataaagtccaatctttagaatcatttgccttggaaaaggttgataattttaattcgcataaaggtttgaaatctttagttgcaatagctgaaactaattccttggctgaggtatcaattgatttatcgttatttgcaattttaataactttaatatcatttttattggcaattgctaacttaccaccataaccaaactgagctgaaattggtctctttaaccaaattggagcttgattaactttgaaaacaggtttttgagtttctgttgttgaaatttgattccagaaatcattttcattttcagttttaacatcaattgatattggtccagctgtatccttgtaatgattgaataactaattttttagataatgaagcagaagcgaagatttcaggaatttttggagcgaatttagtttgatgaatccagtttggtaatgaaggataagaagctaattgaataccttcaattggattccaaagtaaagttgaatcatccttaccagaagataataataaattaggatcatcgagacaccaatcgatggataaaataccctttttatgacctttaaggattttttcaggagcacttgaatttcttaaatcccaagttaaaatgacaggttcactatcattatctgaagcagtaactaatttagtactttgagttggatgccattgaatagtagaaaggttaatatttgaataattcaattgtaagacttctcttttaacttttaaatcccaaatggaacctataaccattatcaccagctgtaccaaagatatgtgccatattattattccaagcgagtgaagaaactttacccattggagaaattgcttgacctggagtaatagctgtatgtttaacagtatcccaaatgaagatttcaccctttgaagcagatgaggctaagatatgagattgaaaaggattaaatttaacttgtaaaactggagttgtatgttttgtatattcttcaattctagcatttattaaatcttgtggcttttcatttaatattttattagtatcgtataattgaataggttgaattttccaaaccacaagctaagatagaagtatctttaccattattccaatcaattgaggagaatttaccacttgttggtgcggtatagattggttcattacttttatcatcaccacttaaaggagaatagatcgataaatgtgaatctgatgagaacgtatcatccattacaccagagagtgtaccagtggcaagcattggaacagagtcatgagaccatgcaaacaaagcagtctcattaatttcattaagcttgaccatgatcaattgctgtttaaggtagtaagttaaaggagataatagtaatatacaaataaaagaccctacaaagagaccacttgtgttattcttagattcccaaaatgaaagaattcgacaacacatcactcaaattcattaattatgatgcgcgaaagttgtgatttttttgagactatcctcagtttctcagttttcctgtttaatgatgatcttgttcaatgtcttttgtaatgatttcttccatggagtgacccaatcgtgcctacaacatcttaataccagtgtagtctgtttatctgtggaaattatattgatattgaaagtatcactaggttgatcgaaaccacatggctttaatcttggattctttaacttgtcctagattagatatctctatggatgcattttccattttagaaaacctttgatcggtatattgtttcatatctataccttctaaagatgaaatgtaatattcggatattggtgcatgtgtatgaatatatgtattaatgtattcaacacatggccaattaatttcctttgaatttattaatgaatcaagtttattaatattaggtaacttcactccaattgaactacaaagagaccgaatttgaaactggtggtttctggatgattttcattttggatctttccacgaatatcaactgggattgctgtttcaatatcctttgttggtaaaaattcctttacactcaaattagaaagaagaactaatagtgatgtcaatttgacattatgatctctgcataatttcaataatgtagccatttcatcattatcgactgtaactatttcacaatcacttaccttcgtaataccattttgacattctatagttgtcaaatttccattctccattagatctttatatggagattcgatttctggtataacaaaaccttctggtgctttgtaattaataaattcattaggtgcaggaaatacaattgagtttgatgatctcttgaacaacattcgatcatactcaccttcattgtctaataattttgataactcaacttgaaagtttttagtagagaccccatcaaaaaataaatgatcacaaagtaataaaatatatttgctattaataactttcaattcccaagtaacgctattttcatcgtaggtgaaatactttttatgatatgagttaagtatcgattcaactgattcttcttcaaccgtcacaaattcaacaacattatcaaataatatttcattaacgattgtagctttgggactttttccgtccacagacatcactaaaattggatatttttcaatcaataaacgtaaagccacacataattgtgttttattaacaggtttttcatactctgctaaaatacgtacgttactgtaagtatctattgatggtcttatagtagaaaaactgttcaaactgagaaagatctctcattgatttctctttaagaacgtaaaacttccttaattactaataagattgcaaaattgacaatcaaaaattatgtcacatcaaaaactgaaaaattcgtaatcaatattatacactgattagctctttatcatgtatatatctttcttattaactaatcaaacaccaaatttacccctatatactatcaatgaaaccggaagataataaaccagcgattcaagaagaagattcagatgcgccagatccatgggataaacgaatatcagatactggatgttttgaagagaatcaagcattacaaatttgtcattatgatacaggtgattggcgtcaatgtttgaaagaaatgcaagcatttcgtgattgttggaagaagttcaataatgatacccgtgtgcatactgttgataattaaaggaagtttttacttaattaagtattttttaatggttaattctattttactgtatatagtttaaggatattcttagcccatagtggcttattctaaaatactttgcatgattgataatcgttgctttactaggcatgtatacatctgaaactcttagtgtttgagatgattcaaatcagaataaaatcattacgtaattgtataaaatttcctaattaggtaccagtacaaaccagcttcaccaattgtcaacattaaaactcttcaaccagcttctttccttcacttgcttatacaagatggatcttctggcacgtagagaggaggcattacaacgtgcccgaactgtatggaaagatcttattgaaaaatatgaacatgcaggacccagtgatgtggttgatttacgtactggagaagttgtaattgatagaggtcatttacgttcattgaaaaatgaaggacatacattagttcaaagtatgatagacaatgagaaaaagccagctgaaaaacaacaaccaactaagaaagtaatacctgtaataacgatagattcacctacgaaacctaataatgtatcaggacgacctctaacaagatcgagtgttgcaggtcatgataatttagttttgagtccaccattattcaaaaatcataaacaaaataaacaatcacatataacttcaagtcctcgacccgttgatgatcatgaagatccactgaatatattatctaagaatgtacgattgaacaatccatcaaaggttcgtagatataagaaagctatttcacgaatatcgccaaggagaagtcgaattcactcacttttgagaaaatctaaacatgttccaaattaacgtgttttctttaattttattttattttcttctaatttgtttatattatgtattctttgctttgatttaatttagttgtataacagtttgtatattacaataatgagtaacaaaaaagatactctagaagatttaattgctgaaagagatcaattgattgagaaacgaaataaattggagaaagtttcacagtttttacgtgttccagtacatccagattctgcatctttattatctaaatattcaaaattaccttcattagatatagagaaacgtatacaatatagcaagttgaacatgtcctggaatggagatagtctcatgtaagaaggaaagaactgatacaaaacttgacatggatatctgtttaaaatttttaaattctggtaacttataatatacatctttcgatcaatgcaattacccattgggtcaaaagtttacaaatatctccttgtgctgaaatagtaccatattcatatacaataacaaaacttattgaagaatcagttagtactagaaatgtttcactattcgtatctacaatgaattcaatactacgaatgaaacataaaattatccatacattcaatgaaattttccaaaatctaccatctggtgtagaagttgataattctaatggattttttgaaccaatattgtttaatttaccatcatcaattacacttatcaatacattggctattaattattcgaaaatagagaaattttctgtaaatctgatttcaaggtaattgacaatcaaaggatctaaaatttcatgatatttcaacagttttcaaagatttattatcagtgaatgatgttaaagttgcaacattacaattattagaaattttatagaaaagctagaaaaaacaaacacatatacaaacacgaattatctatattgcatttcaacaccagctcttgaaaatccacatttttcataaaacccaacatttttttcatcacaatctaaaataactttataacaaccattttctattgccagattagtcagatattttaacattgataatccgattttagaacctctcattgatttatcaactgcaacatcttcaacatgaccaacttttgaaaatccatgaattaatttagtttcaataagtaatgtactaataccaacaatttcaccatttggatctttgatagttatagtaatatgtttatcactctgttcactaacatatgtttcaaatgattctttactaacttctccgacaactgttaattgttcaagtacacgtaatgcacctttatcataatcttcatttgttattctttgtaaagtgaaaccttcagggcagtagcggtatactcggttcaacgagcataatttatgtataagtatgtgtatagttttgtttatagatattaagtaaaatgaaaagaaaagtatataattataaagaagttacgtttcatgaaggattataataattattaaaaggcatttttctcgatgtttgcaattaacccaaatcaggcaattttcaaatggatctgacataagtttataatcttgaacttattttcgtgtaatatcctattcttatcttaatattttcttattattatgctttactttgttctatataaaatacaaaaaggtttttatgtacattgtaatgtaatcttaaggtttcgattgaattaattaggttcaacattatatttcattgaaatacccattgcacttaattcactatctaaatatttcaaaacaaatggaattgcaatagttgttgtattaccacctccaataaatcttttacctgtaccatcttcccaaacatcaacattttcaatcatatttgatttatgaccaatatttttattatcaattctagttgaacaacgtctacaacgaatactttcaccacctccaattctaggaacacttacttgtgtacttaataatgatccacaatctctacaaacacttgtatgtgtataatctgaacaatttaataatctatcttgtaataaaaatgatgtaccatgaccaattaatgcatccctctccatttcaccaactctaataccaccatgtctcttacgtcccttaacaggttgcattgttaatgaattaacaggacctgtacttctaacttgaaatttatcattaaccatatgtcttaatctttgataataaacaacaccaatataaatatctgctcttaattcttcacctgttgcacctgaatataatggttcattaccatgataattataacctgcagattttaattgttcaccaaagaaatctgctggcatatcatcttcactgaatttccatggagttgcatcttgtgatataccatgtaatgcacctgctttacctgctaaagattcaacaaacataccaattgtcattcttgatgggaaagcatgtggattaattataacatcaggttgaataccagtttctgagaatggcatatcaatttgtggccattttcttgaacaaacacccttttgaccatgacgtgaagaaaatttatcaccaatcaatggttgtcttgtaattctatatttaattgataaagtttgacattctgtattaccattatcatcacttaataatttaacttcttcaatatatgcaggttcatttgaatgataagttttaatcttagttttgcctaaaacttcatcataataacaacaaattggatcaccttcttcaacatgtacaccaatatatggtaatccatcttcatctaatttttctctccattcaattggagtttcatcaggtccaaaaccaaaatgttgagtaattggatcatttctacgtctttgttgacttaaatcaatcttttcaactttataaacaacaccatatgcgaaacctctttcatcagttgatttattaataatcatggcatcatccatatcataaccagtgtatgaaataactgcaacaactgcatttgtaccattagggaaattatccattccataatcatcatataaattagctttaacaattggagtttgacctgcttgtaatttatataatttattatcagatctatgaaccaatgcaacacctggagtacccattgtttgtttacccatttgacattgatacatatttcttggagattgattgaaatctgagaatggtgttaaattagctaaaattgataaaatattagttggagaaaattcacaatgtgaatgaacattattttcaatttcatcaggtataactgcaatattcatgaaaacttgttcaaatggaccaacaatatctaatttatttaatggtaaataattaacaggtctaattaatcttgaacgtccaccaaataaatataaaccaggatattgaccatgatttgaaggtggtacataaccaatttctaatgataatggtataccatatttttcagaatcttcaattttccaatatcttaaagtatcagcaattattttaccttgtttatgagaacaataaccaataattttaccatctaattgaacacaacaaacattttgacctgcaattgaaactgatgaagaatttggtttaacacctaatttaaataattgcattggaattttacttgtatcaatattttctgttgtaatttcacatttatgagctaaatggtttaataaaccacaaggtgaaccatcaggtgtatgaacaggacataagaacccccaagattcaggtaataatttacgaacagttgttgttttcaattcagcgaagaaagaacctctatgaaccattctaaaatgtgatataaatctatggaaattaattttttctgcaacaactgtataaccactaacttgttgtaaatctaaaccagattgtgaaactaaattaccagttgataagaaatactgtaatttttgaccaatattttcattaattcttgagaaaactctagtcatatattttctatcattaaaattaactgcaatacctctattaatatcggattgaatttgtaattttaagtttgataaatattcatcaattttttcctttaagatcataccataaaggaaaccacctaataaaatttcttgatgttgagttgaatctggattatcaggtgaacattcaccagcgactaatgaatataattttctaatcatgaaacataacattttaaatttatcattattatcatttaaatgaactaaaacaattctatttaaaacttcattaccaacatcaatatcagtcatatcaggtgaagcattgaaaacaattctaaattttttacctaaataagcaactgattctttatttgagtttaatttataatttttaaaagttcttaataataattccaatctatcagttaagaaagaattatcaacatcagaaccgacaatattatcaaaaatttctttatcagaagtttcaattaatgctttaaggataagagtaacaggtactaaatattcattttttttccaagagaatctaaaggtaacattaccatcattaagataatgtaagacattagtttgagaagtttgatctggtctaactgatcttaattgaacaccaaatgcagaataagaagcacctctattaccgaaagaaggtctaataattgccattggatgatttcttctttgaacaataagcatacgaattaatttttcgataccattaacgatgaaataaccacctaattcatcactttcttctcttaagttaactaattgatttggggataaattatttaaatgacaacgatttgattggaccataattggtaattgaccaacatctctaatttcagtaatttcttcatcattatcattaattgaccaagctaattttaataataatctacctttataagttgaatgtctttctctacattcacttggataaatatttctattaattgataatttatcagttaaaggtacggaaggtttagcaatttgaactgaatcaactctaatttttaatttatttggaccgattttttcaggatcttttgaatcaaaaattgttttataaccaatatctttaacagctaaattaagtatatcatcagttaaagcattaaatgaaccaatatgaggtttaacagcattttctaataatgggaaatttgatttatcctttggaggatttataaatctattttccctctctaaagttctaaattgagcttttgtcattatttgaataaatgagggggtggttgggggaaattagatgctgtgttgtaatacagaaatatacaaaaaaatcaaatcaaaaaattaagttaaaatgaaaaaaaatttaaataaaattattaaaataatttttcatcatcaaacagtgtcttctaattagtaaagaaattattattattatgcttaccgtaatctgataggaaaaaaaaaatttttctattagcgtcgatgcgtctgtgttttatttttttaaattgttgggtcgatgcgtctgtggtcaaaagaaatggtagttacgtaattactgtagtttttttgatgagccttcatcttatacgatcactatacgattagaaggctcatccttatgtctataggttttagtaatttagtgatttagtatttagtacagcatttgcccttgtgttttctttcacagttttattaaccacatcttctttgtcttttttctttttaattattatgtttttactattatcatctatctaattatggtattatattaatactaagtatattatcaaaaatatcattacgtaataaccttttaactatctatacatactaaattcaattaggtaataataaatttttcacattctaaattttttttttcataatttttcatttcttcggcaggaatgattcaccagctttgacttttcttttcaaatcattacaatactgatatttttctacatcttttcaacttcttatatactttcttaatttttttcttttaaataaccaaaatcatatacaatgaaagtatctgataaattattagcagctcatagagatccatcatctccagctactttttcatttgaatttttcactccaaagacaactcaaggtgttcaaaatttatatgatagaatggatagaatgtataatttaaatcctttatttattgatataacttggaatgctggtggtaatttatctaatttaacttcagaaatggttaatataacttcaactgttttaggtttagaaacttgtatgcatttaacttgtacaaatatgccattaaaattaattgatgatgctttacaaaatgcttataattcaggttgtcaaaatattttagccttaagaggtgatcctccattagatggttctgaatcaacaggtgattttaaatatgcaaaagatttaattaatcatattagatcaaaatttggtgattatttttgtattggtatagctgcttaccctgaaggtcatccagaagaacctgataatttgaaaactttagaatatttaaaacaaaaacaagatgcaggtgctgatttcatagttactcaattattttatgatgttgataattttattaattgggcaaaacaatgtaaagattatggtattaatattccaattatacctggtattatgccaatttcaaattataatgcttttattagaagagctaaatggaatggtgttaaaattcctcaaaatttcattgatagattagatccaattaaagatgatgattcaaaagttagagatgaaggttgtttattaatggctgaattatgtcaaaaattaattgattcaaaattaattaatcatttacatttttatacaatgaatttagaaaaatctacaacaatgttattagataaacttaatttagtttcattaaattctaaaatgaattatgaattagagaattcaaaaccttggagaaaatctttaaatccttcaagagagagtgaaaatgttagaccaattttttggaaaaatagaaaattttcttatattcaaagaactaataattgggatgaatttccaaatggtagatggggtgattcaaaatctcctgcatttggtagtttagatatgtttgaacatgaaattattagacattctccaacaaaaattttacaattatgggataaacctttaaatattaatgatttaggtaaattaattatcaattatattaataataaaattaattgtttaccatggtcagatactcaagtcacaactgaaattaattcaattaaagctaatttaattaaattaaatgaaaatggtattttaactattaattcacaaccaaaaatcaatggtgttaaatcaaatgatccaattttcggttggggtccatcaaatggttatgtttatcaaaaacaatatttagaatttttaattccaaaatctaaaattgataatttaattaataacatcaataaaattaatgaattaaataattatgatattcttaactatattattactgattcaaagacaactactattttaaaatcaaatattactgatcaatctgacgttaatgcagttacttggggttgtttccctggtaaagaagttgcacaaccaacaattgttgaaaaagtttcatttcttgcttggaaggatgaactttatttaattttgaaaaaatggtcaaatgttttattaaattcttcgaatgatttaaccaatcaacctgatgaatcggatagattaaatgatttaaaatcttctaaatttattaaatcattaattgatgattatgttttagttaatttagttgataatgattatgttaatcaagacgatagaatctttacattatttgataacatttaatactgttccaacgacaaaaacaacaacatcaactgttcatattcatattcatattccataatataatgatataatgatattatcatacactctctttaatttcaacacggcttttagtacacaaaggcaggtccatattcaacacaaaaaccgccgatcaatttttgtttcttaattatatttcattttcatttttcttttatctctcttttaatggtttcaacatcgtatttaatacatatttcaacatgccctaacacacacataacttacttgtataatatatccctcttatatagattatatagtccttttctaagtcctcaacggataatggtttttcaacatgaaaatttattttttttttttcaaacgcttgtacatgatgatgtaagttttttttaagataataacaaatcgaagtatcattgattcatttctttcaggaaacaatgtatatttgttctataactaacactgtcacagatacacctgttttatcactgaaatcaaataggatatttgataaatcaacattaaccaattacatagataaattcggtaaagatccaataaataatgaattaatgaatattgatgatataattgaaatttcaatacctgaaataaatcaaaataatcaaaatgaaataactaatgtttcatcagttccatcattattaaaatcatttcaaagtatttgggataatttaagtatcgaactatttcaattaaggaaagaattagatataaccaagaaagaattatcattatcattatatagacaagatgctgctgttaatgttgcagttaatgcatgtaaggaacgtgatgatgcaattcatgctttagaacaatttatgaaagatagtggtaactcacaaaatgatgtagtaaataatgctgtaaaagaaactgaaaaggaaactgaaatcgaaattgataatgataatgaggttgacaatgttgatgaagattggttaccaatttctgaaaaattaaatgaagaacaaattaagcttgttgaagaacataaaactactaataaatcacttagaggtaaatctccgatatattcactcgttcaagaaaatgaaaacaatgatgaaagtcataatttatctacatctacagatttcattgatacactcaaagttggagagaaaggttcactaactacaattaaacaaaatcaaaagggtgattccgctgtattggtttactcagaaaattattttcaattaataagtttatcaaatacttcattagaacccttatctgaaattcatacatcagcaaagggtaaatccaagaaaactgtcttttggatgaatgaaacaccatatgttttaaatttcccagcacaacgtaaaaatgccaaagctgatagtaataatgtccaattaattaatattcaatcaaaggagaaaacaggtttcagattgaatagtgagaatttaaaagatatcacttcagttattggacatccatcaataaatttattcattgttgcatttaaagatcatttagaatttgtttatgatttgaaaagcgttttcattcaacaattatcatctaatataaattcaattcatttacatcctgatggaatgttattaggtatttcatatattgatggtaaagaaattgatatctatgatttatctgaacgtcaattcaaattaaagattgattggggggttgaaaatttgattgattttgaatttgcgattaatggttatttaatgattatagttgttgaaggtaaggcaatgatatttgacttacgaaaaaatacagtaaccttagaatctgatgttaatacaagtcggtttaatggaattttcattgatgaaggtgtttcattaattgtatgcggtagtcattatatcattcttgatccaaagggtaaatcaattgtaagctctggtgcaattaacacatcatctcaaatactatcacttcacacagattttgaaaatggtaaaattcaaacgataatggcaacagacggtgattctggtgatgttgttctaacaaactttatctaaacttaggatgtcaatcattatctatctaatatgtaacattatataaaaagaaataacaataaaatagaattagaaaaaaattacactttaatttcagggaatgtaattgtttgattaagatcaattgtaccaaatgtaagtggacctaaatgaggttgaatattataacctagtttaaaagtacccgtacgaccatgtaattcaggtgaataatcccatagtgaatatttagatttaatattcttttgattgaaatacattttactcttatcatcaaatattttatcccaaataacaattttatcagcattttcattatcattattattactatcatcattatcaatttcaacataaacatatgcgaaaacttgtttagtattccaatcaactaaatcattaaaatctgcaaccatatcaaacttaaatttagcattttccttaggtttttgcttagttgcaccataattcctcgtatttttcaatgaaactataggttttgcagatttaaatctaatttgattatttaaaataggtggatttgcaattgttaatattgatacaagaatcataacaataaatacacctgttgttatgattgaagataatgtgtttgccctctgtgctaatgaatgcatggttgttcctacaaattaatatctgatacgaggaagtacgtgtaacgtgttgtcaagtgtcctttctctgatcttcaataattcatgacatgaaaataattataacaatcgcttacgtaataatacacagtgctatatacaaggttctattatcttattagtgttcatctctaggtatccttgtaaagaatctcttgtctatcgttatactccttttgtgccttggccttggcttcacggacttgtttacgtgtttctctatgaacggctctaatacagtccacgtacctctctttgttgttgttcaatttcttttttaacatcaaaatccaatttcttatcttgaatacgatctgttaaatatttcagttcatcaagtaattctttacacctttgacgaccctttatgacaacttctaatttatttaacattgacttacgtttagcacgttgtctcgatatcttcgtttgacgtctttgttcacgatagaatattctacgcatactcttagtttgtaaataacttgatctaatatgacgtctttcctttaataaatgttctaaattatgaagaatatacttgtttgatgatcttctcaatgtcttcattaaatcgagtctttgaccatatgacaatctctcacttaatgcaatcgaaaggttcttaataacatcataataaacatcagctctaaattcatattcaggtttacgtttcataaatggtataagatcagttgtatattttaatttaactctcttaaattgctgatttctgatatggattggtaaaaggtatttatcaataaatgttgctgcttcctctaaacatacaattctttcacttagaaataatgcagtctcatttaagtttttattactcattactatacccttttgaattaattcaccaactatattagtaacttcattcaatttgtcaggcagtttctaattgtctcaatctataaatccaaatatcatagtgagactttttaatccaattaggtattttaactcttgcatcaggcttcttcttaaccttattatcatcataataacttcttaaattaatatcttgttgtgaatctaatctactaaattcgtttctatcttcaattttatctaatctagcttgtgaatctttaaatctggaattttcattcaacttagttatcatttccaaataagtttcatatttttcgtcaaattcaatccatctttcctcttcacccaataacattaattcaatatttaaaatatgtatattattagttaatgtatttctgcttgtttcaagatatgcttcaaataattttcttgcttcaaaaatatccttatatttaatcacagctttaataactaatttgaatgacattggatttaaatctgcatttaataacccaaacttatcattctttctatttgtcaacacatcatctaatatagtaatagtttcatcaatactatttcttgcaatccatggcattgaaacattactttgtaaaactaatgaatacatcttaggtgtcggcgaaacattatttattaatgcataattaacaaatttctttgtcaaccatggtctatttgttcttaaagctgaaaaaatcatttgattaaaaatcattgatggaagtttatcaattttaagggtttctttaatttccttcaatttataatcaactccaaatgagccattttttctaacccaataagccatatatgaaacatatgctttatcatctatatcacctctatttattgcaatagttgatgctttcttccaaatatgttcataaagttttatatctttacatttaattgcactatctaatgctaaaacactatcttgataaaaaatttcattttccttcattttcatataattatcaattattatatcaaatctatttgcatggaaatgtgatttcataataaatctactatcaatcctttgaatattaagattgaattttggataatagaattttaaaatatattcaatacttttataatctcccatttcagcaaatttggtgaaaattggtataaatatagctttcggtaatcgaacttcctttttaactaattcatctaaaaccatatagactgactgtatttcattcatatatgctaatgattgcatcattagtccataagatttaggtgttaaattaactttataatgagaatacgctgtaaaccattgtaatgcatcctcatatgatttagtattaacgtatgattgaataattgatgataggatttgatcatttggttcaaaacctcttttaagataattctcccataatgacatcataactttatgagtgcctggacgaattgataatgctgtgaataatgtgatatattgatcttttgttatcacttcattattttcatatctggttgtataaattttttctaattcatcccagtctttagttcttgctaaaataattaaaatagggtgtaaggtttcatcagattcaaaatctggatcttcttttataaattttttcaatttagttttagcttttgcaaattgtttatctgtcgttaatgcttttaaataaccaatcttatcaggttttgtaattgtgagctttagttttatcttcaaatgatagaaaatttgccccacatatgtattattttcatatttactgtgtgtataaatcaagactgagaaaacattactcaattgattgttatcatattttaaatctttttcaaaattctttggtaagaaatggagtttattatttctgagataaattataggttggatttctctattatatcgtagtttttcattatcgtaacaatattcataccaaaacttaaatcttaaagttgttatttctagtttagataatgcagaaatcaatttatactgaaacgaattctcattaatattagtattatcgtaatgcacatcaaagtactttttcaaaaattcatattgttggtcaaattttgggttacttaatttcattgaaagtaacaaataactgattgatcatatttggaggaaaataaatattcatcttagaatccaagtttgtcaagtaatcatataaatttagttgtgatattttatcaaagtttgaatacagagtagagacaattcttaatgtgaaatatttcaatccatcaaattcattctctaataatagacggttcaatatcggtttagtatcgtcaaatataatcatatctgttaaattcattaaatcttttatgtatggatcattacttaaattttcagtggatttccaaataattggaattttatcatatttgaaaacttcaaagaatgtgtataaatcattaggtgttccaattttatcaaaaatttcaataattttactgcattgaccaaaattgaaaaacaaattagtaattaggtaaaactgatttaactaactgatatgctaaatcatattgtttattggtatataaccaatcaaagagtttagatacttgtaaaattgaattgggggtaattgattcaggtaatttcatatcaaaatactttagttcattattaactgcatctaatttatgtattgctatttctcttatactaccatctccattaggtaataattgtatcatttcgtaatatcctatttgttgagaagcgtcgaatagacatcgttatatttacatgttccttatttcgtattgtatgtcgaaagtggttgtactctaatgtattatattgtcgttgattgctattggttgatggcgaaaatataggattcggtatttgatcaagtgatttcttctgatcaaatgaacgcttcactattagagtttcccttccatggaaaaatgtttttctgaattggctcattatatatatgatgaataattgattgattgatcccctgataagttctataaaatgttgttaatatgtacagatttggtgttcttttttattagtagggttttgttgggatcagagtctctttttctgcaatactgtcactatacaaatttgacaagctcgattgtattgctgatattgatgataagtgagagagaatggattcaaatatggtcaaatagagaatatgttcgaagatggagatgtaaatccttcctaattgtcatgccagaatagtaagttccaattttccaggaaatttaatttttcaccttcactcactgtgtgggaggattagcaaaaaaatattttttttcactttaaaatttattttctttacaggttaggagtatttcttagtgattaatacataaagtataggtaagcataatggcattaactggtaatagaaatatacgaggaaataaaggtcctagaaaggatactagaaaagtatctcaatggtaaacagggaaaaacagatgagattagaaaagctttgacacatagagctagacttaggaaaaactatttcaaattattagaaagagagggattagatgtgccgagtaaggaaggaagtgatatagttgaagaacattacagggaagaaagggctgcagatgataatgataatgattcagaaaatgaaaccgaagagaatgaaggacctaaatcagaaattgatataattaaagaaaaagttaaagaacataaaccattaacatttcaagaaagaatggcattgaaaaaaagtagaaaagaattagataaacaaagaaaaatggaatctaccaagaagaagatacaaaaaatgaaagaggaaaactaccaacgtcagagacaaactgaacgtataagaaacactaaaactagaaaaggtcaacctcttatgggtccaagaatcaacagtttacttgaaaagattcagcaagataaaaccaataataaataattagttcgttccttagatatccactaaattgtataataactctctttgtaatgattcaacatttgcatcagtttcatgatatttgctagtgatacctcttgtttcactaacaaaggaatttttgtaatcacttaattctacgatccttctctttttagtattttttatagcttccgtattggtatcactggtgtataatctaacttcaccatttaaccccactgcaacaaatctatagctatttttgagtgatctatttttagttggtatccatggaggataagctttaatgagtgaaagtcttggtgtataacccacatttatttctgaatatttgactaattgttgattgcataatgataatgttcccttttgataatctgcaactataaaatctgtatggttattacagattatatcagaacaacggtattcaggaattatcttatcatttgtagtatcatttaaggtatgcatgtaacgaagtttcatcactgtattatttcttaatgtaactaacaaatctgtgtaaaatggaactttttcttgtttggaattttgttgcacaatttcaaactttttaataggttcagttccatgatagttgaatacatcttggtcaattaaaaacttttcacctgattcgattgaaaatgataatatatcacaatttgatgaaagaaacaaacgcaatctgtcctccaaaatgcatttaagatcagttataggtgattctgttttaattaccggtgtaagtggtttgacttcaacatctttggtagttttgttttttaaaatctgaaatattttcaggcatccctcttttttcttttttatacatccaacagcaacatagtaatacttttgttcaaatttatcaattgcaatttcacacccacatagtggaattgcatcttcttcaaaaagcttgtttatactctctccattctttaaaagtttcattcttttataatcaaaaaattgaattggatctgcttgtttgacaactccaggaataggtattaacataattaaaccatttgataaaggaaccattctcattgattttgaatttagttttttacttttaactaatgttccagtagtgtttgatacagcaactattgatagatcattatagcgcaaaagcgcaatttcattagctgcgccattactcccatcgaacttacaacaactgaataataccggagtcaaaatcatcacaaaacaaaactcttttaggatagtatgatgactttatatcaagtttccaaaggtaatcggattttaacaatatatcattattatttgttttgattatatcaatttgatttttgtcggataacttaaatgtacctaaaacagaccaatctgttatatcatttagttgaccacctttgattttcaaaaatgagtaatcaccttcctttgatgttaatatgtatagatcatggcctattcaaacaagtaatatcatgaggtttgaaaatattagtcttcaattttaacacaccatcattcatatcctgctttaacttatctgtcgtgaaaagctttaccatttcatccttgtttccattctgtttgtaaatatttatgaatccttcaataaatccaataaacaaatacttgacgttatttattaacacaaatttcaacattgacagatttttgaaattattttgatcatctctaaagcttatgttattaaatgtcacttgtgtatcactcttttcagctatttcaaatatgacaattccatatgtatccgttattttggaatatttaagtatagagaccgtgttaccagcaacaacggcagttatacactgatcaggaaattcaaatttctttactatattcaaaacagcatcaaaaagtatcatatgccttgtagaaatcaaacataatttgtcgcctatgtactctaatactatcactttcccgtcaattggcacatctacttccaaaactagagtgttttcgacggagttatatttatagattttattacttttaccatcggaaacccatatcaaatcgcctttaagtgggtacaacttactctgtggttttgcatctgcactttttattgtactaaatgattttaccagtatatccatttttgattttgaaaattgaattatttgattcctggccacccaatgcccagaactcagattcgttcgcttcaattggtaatgtatcatttgaagcatcaataatcttatagtcaatcattggataagggtacagtgacgaccatttgtcagctgtaacgggtcttaaaattggtatgtcattttcaacaactattttaacaattttcgattcagttactcccatttcattggcgaatatgaaactaaagttggatgtattttcaattgtttcaaatttaaaaaaggaaaccgtgtgcttatatttgaataatcttgtcatttttgtaaggtatgtgtgtttctgtgtatcataaaaaatatccagtaaaaacaccgttctattatgagacgttgaaattaggacctgatcatgtaaataaacatcaattgatagtttatcactacctttgacagaaattttctttttagggatataatatgaatttaaaacaaatttggtagttgtatcaggatatttagctttatgattttcagtatcttcaccaccagtgaaaaagttcatatgtttgattgtataacctgattcttgcaggaatagtactgaacgagatgcatttaaaggaataatatttaatggaacttcgaatgtatttttcattgaaaacttattcctcaataatttgtttacatcttcaaggttttgaatcccattaatggacaatgtgttattcttctcgtgtgatgagtaaactaacatttcttcagttgatgaaattttcagtaatgttgcattaattacattttcaggtatattataatgcttaagcaagaacggtattcttttgttattgtaatgtatcttaaaagattcaacaacattttcatgaatgaaaaacactgtatcagttttatcacttactaaaatatttgaaagatggccggcatttgtagaatattcaaatacaacatatggtttaaaagactgtatatttctctcatatgaaaaacgaattaacaatattttagaagaactcaaactcaaaagtaatgtatcatcatcatcatccgtcgtccctttaaaaacagcggaggcttcaactgtacaaggtaaagaatagaaaaattcatcatcaatagaaaatgatgataaataaacaaatattgtaacttctcttttcttcccagtaactaaattttttaaattatcattgtaactatcaaaatcactgaaatcgtcaaatatttcattttgcataatataatcaccattttcatcatatttatcattctcctttgccttcaaatcattcaattcctttgaaactgtcttgtaattttctgtttgtgcaattacagaatttgaattaccaaatatggatgaccattgatctttactcaataaaccatgtgttgatccaacatccatttccatattttcaatgttttttacactgtgactaattgaaaagtcaaaaaatgcattgtttggtaatctagaataaatcaatgtctctgcgcataattttggtttatttgatgggtatatatccatcgtatgttcagttgcttgtgtataaactatctgttttcttaaagagcctttgactaaacttatacatgattccaatttttttcaacatgaattgttgatctaagaattacccgattaggaaatatattgtctaaaaaaatttttaactatacaattttacacactagcttcagctttaacatcttcattatctaatttctcctctttctccttcgctggtaatctatacttaacataatttgaatgttttgtataataactaaaatttttatctattttatttttctcatcaacaacaccattaacaaatgagcttaaaaatttccttctattattaggtatagttttattaacataagactcgtgtttgtaaagattattgaaaatattgtagtttttcaatcttgtatcctctttcttcttatatgacgacaattgtgtaaaatatttcttttcctgtatttccctttccttagcaactctcatattctcatactctatatctgaaatattagaaccggcatcagaaccattcgcattattaaccaacctcccactttttaccgtaccattatctctcttctttttcatcttattaatgatatgtgagtaatcatgtttaacatattgatccattataaaacgtactctaaaatcaattaattctttcttaacaacatctatgatatcaaatgaaacatcagacaaatctttaggtttaacaacatatgtgtttctcaatcgtttacatctttcaatgtaatcatcttcatctattacatcatctcttttaatagtcacatcactaatttttttcaatttttcgaaatgttcattcaaatcatcaattatttcatcaacaagagatatttcaacttcaaataatttatctatcttatccattacgttctttctatatgaaatatcagtgaaaacttcaattttcttctcattattcattatatccattttgttaataacgtattggaataaatataacatcatagcatctgtaaaatatatgaaaattatttgattcttcacagcatatggcttccctgtaaaatatgaccaacaaaattcaggtgatataggtatactttcattattttcaagtaatttacatttcggtatcacattgatgatttctttaataatatgttctataaaattttcaattaatgcattaaatgttagtatactctttggtaaatataacatcgttgtaactaattgcggatataattttgcttttgtttgcagttcattaatattgatgaatctatgtacttgatcatatggattgacaattggttcttcatctgcttcttcgttatcttttcctctgttatcactatttgttgaatttttggataatatattgttgaaaaaactgctaacttctatattattttctctgagaaactcgtagaggttccctgtatcataaaattgcagacttttcacagttggtgatgaattgtgaatattcgttaacgcttcttttattttgttattattgtctttttcagtctctgttttcccaagttcaaaactatgcatactgggcctgtaataattacacttgaaagtcattgatttgttgattatactgttgtgtttaccaaacgaaattgtataactcttgttgatcttttctacagtcactacataataataactgatgcataaaaacctatatacagacttttacggctggtgcgtaggtggctggtgaaaaaataaaaggtcctgctaataatcggaataatctcactacacttaagctaagtacggctgaatttttcacttattaacaacacctgctatgcacttcttccttacataccagtggttagacatgcattttcatgacattgactgttatgagctcggggtaaaaccttaattataaaaattataaatgcctgaactaagagataaaacactaaaaaacgaaaaaacaattaaaaaagaaacacttatagcaatggaagaaaaacctaaagatcaactaaaggttatagaaattaaaaaaatagacaaaacaattgatgaaaaaaatgtgtataaactgaaacgacttgaatttatagaaaaacacacaatggaataaactgaaagttgtgaactgaactgaaagttgtgaactgaactgaaagggaatgatatagtgtagaataaatcaacgaaattcaacaagtgtctactcttgttgaacatgggtattatttgatgcaactggattatttggtacatcacctggatgttccattcctggatgattataataataatacattgggtatatttgaccattaccattgctttgaggtggcatatagttaggatattgataataataacctccatttgtaggtggtggtggtggcatattaccattgttcatatgatcaactggaatcattggatgttatttgagggattcatatattgcatatccttagttgggtaataataataacatggatattgataagatggattcataactggtcccatatgcatatttggaatttcaacttctccattatcgattgaactataggtataaccagttttgggaccagcacttgaaaatgttgcattacttctcattgttgatatatcattttcaacatcatgtttaagattgtccttattaggttgaattttttcaccattattcaaatcatcattaccaataatttcaatactcatactttcatcattttcatctaatttagaatcattcatagaatcatcaacaaaactttgattagtacttgtttcatcatctttctttgattcattgtccattttggctttatccatattattattttcaaatgcaggagttttagtaggaatgaaaggattgttaaattgattatcttgataatttaattcaccgttatttcttctaattgtgaaatcattttgatttctatttttattataaaaattgaatctatctctttgaatatattggtttttcatcttaaaagcttgagaataagtttcaacacctgaattattgacggtactactgaaatcttcaaaatatgaattgtttctagtacggtaattggaattataattattattgaatttgaaattattcatgtaagtattattgttatgattactattatgattgttgttgacataactacgttttttgaaattaacaggtggaggtgctaaatttaattttaatccactatcatttgagaattttcttctataattattatacatttcacgatattgaacatgaatagttttatatttgaacattgaatggttttctctttcaactgccgcagctgctgcttcctttgttttaaatttaataaaagcaaaattacttaatggtctattaactaaaattgcttcctttattttaccatgttgttcaaatctttcaaccatttcatctttactaattcttggatctaaatgaccaacaaaaattgaatatttatcaattgtaacttcaggtacattactatattcatcttcaatattttgagaccattcaacattccaatttcttttagttttcaaattggcaaaagcactaatagcatcttgacgatatttaaatttacaataccaagtattatagtgagttttcggattaacatcatcaacaacttttgcattattatctaaggtaaccaatttctcaatttcaccaaatctagttaataacttattcattattttttcaattataccatcatttgttaaattaagataaagtgtacgattaactcttgccttttcacatctgaacagttctaccatttaaaattgaatgttgacccttcactaattgctttatcggcatcttcatctttagcatattgaacaaaagcataaggacgattagcaggatctcttaaaactttaactaaagtcatttcaccccattgtttgaaatgttcagtaacagatttacaaagaatatcatcatctaagttagaagataaactagcaacaaaaacacaagctgaaggacgacctctaacatcttttgattctttatcatatgaattaaaattattattttttttatatttttgagttatagtattaatagcatcatcacttttattaattgataagatttcatcgatatatttttcatcttcatctttttcaataccattatctaaatcaatatcaagatcattatcttcatcatcatcatcactatctctaatttcagaatcatcaacattaacagatactgaagttaatatcggtatcattatcaatatccatatcattttcaatatgatgatgatgattactatttttattattaaaatcatttgaatcagagatagcagtattagtatcagtttgagcaattgagacagcagaatttaagtaagaaacaattgaattattttcatcttcttcatcttcatcatcatcatcttgatctttatgatttttttcattttcaattttaatttcattctcaaattcttgtttaatatttgaattaattaatttattattaactgaagcatttaaatccatattttcgaattttggtttaatttcatcattatcagataatttaattttaatattattatcaaagctagtcattattagattggaattaaaattaattgagagtttattatttaggtattatgatagcagtagataaaaagggtatataagatagcacaatatttttagctacaaaaacaaataaaccacagtaatttgaattttaaaaatttatctcaaaaagttgcaaaaataattcaaaaggtatagtaataaaagtggagggagaatgaaaaagctgtgagttatatctgttttagtagttaattgcagatgattaaatggaagggaagagagaagagagaagaagaaagcaagagaaaagcaagagaaaagcaagaagaaggaacaagatgcaaagcagataattaaatcaacaaacaccagagccatctttataacagtggaaatagggcaattttgatcagttagtaatgatacattctaattaacttcccttattggtacaattgttgcccccttttcaaatataataaaggctcatcaatataatgtataaaatgcatataaaattgtataaatgtagttagtaaattacctaattgggtaattaccttaattattatttgcaacattaaacattgtcataattatgtccccttttcgcttttttccttcaaaaatttttttttctctccaagcaaaaaagaaatttaagaaagtgaaaattgagaaataaattctgagatcatatgcataatgcatcatactagtttaaagtttgtttagtctatacatttaggttaaattagttaattagttgattaattgaattaattaaatgttcccttgatcttgtttattttatatttaattaaagaatatttacgaagaaaaaaaacgtatagatacataataataatttaatgcttgattatcgtgcaaaattcgtacttgcaccaatggttagaattggtgaattaccaactagattacttgctttaaaatatggtgcagatttagtttggggtcctgaaattattgataaaaaattattaacttgtgaaagaatttataatgaaaatttgaaaactattgatttccgttcaaagactggtaataaaaaaatacctggtatgacagatgttgttttcagaacttatcctgaattagaaaatgataaagttgtatttcaaatgggtacatcaaatgctaaattagctgttgaagctgctaaaattgtaattaatgatgttggtgcaattgatataaatgcaggttgtccaaaacatttctcaattcattcaggtatgggtgctgctttattaagtacaccagatttattatgtgaaattttaacaaatttagttaatgaagtcggtaaaccaaataataaaccaattagtgttaaaatacgtttattaccaaataaggatgatactttatcacttgttaatagattagttaaaacaggtattacaaatttaactttacattgtcgtacgagagaaatgagaaatagagagaaaccaattagagattatattgatgaaattaaaaaaatttgtaatgaaaataatgttagctttattataaatggttatattaaagattttaaagaatttaaagaattacaaaatcagtatggtaatgatgttggtgtaatgattgcatcagcggctgaaattaatccaacttgttttaataaagatggtacattaccttggtatattgctgcaaaggagtacataaaatttgctgataaatttcaaaatcatccggcaaattcaaaatattgtattagtagaataataccaaatatacgtaatgaaaatgtaatctataaattaattactaaggcaagaactgcagaagaatttagtgatattttattaaacaaaatggatgataatggtaagtttatagataaggaagatgataagaaagaagaaattactgataagacgacatcggtaaaacataaaattgttgataccgaaagcaacattgaaaaaaaaattaaagtttgataataaaaaatttaatttatttaatttagataatctatattaacacattacattctatttacatgactatataacactttacttctgtaattcattttcacttgtagtaaaacctgatggtgtgatatctttatatcttgaatcataatatccaagaactttataaattttacccatatctcctaatcctttaccagttaatctcttatatgataatgataatttttttttcatttcttcattatcaacaaattttgacattaattgatcaattctataacctaatcccattgaattaaggaaatctccctgttctgtaacatatgtctcaaattttaaatcttttaaaatttcacttaaactactaaaatcaacatcaattgataaatcaacttctccaacttcacttaatggattaacaaatttatgatctttaatacctcttaatgaattaattggtattgtagttgtaccataatcaattactaaacctgcaccaatttcatttgattgaacaattttagccatttcataaatataactatgagattctggtgaaatttcaatatctgaaccaattggtaaattatcatatcttggtgttgtcttaggtattgcacaacttggagttgcatatggtgccttaacaacaacaaattcactatcaaattttttcgatttttcattattttttatagttgttacatttggtaaaagactatcctttttagcatcaggtctaatatcaactaaatattctctccatccattttcagttttagtaaatctattcattggtaacgcatcataaaattcatgtgccataacaaaattcatatatttatcattattagcagtatttaataattcaggtttatcatcctttaaccaagttatttcattaccccatctagatatggatttatatgtaaattgatcaattttttctaatttactagtttcgatatcacataatttcttatattgttcatttattaaaacatcagatttttcaatgaaaacgatttcaattggattactatttttaataaatttatttaatgttctaatcatatcattcattaaagtacctttacctggaccaaattcaataattctgaaaactttttcctttattttaaaattttctctattaaaagttgcttgatatcttaattgatttaagaaagtactgaaaaaccataatccacaaatttctccaaatgttgaactaatttcaggtgatgtaatgaaatcaccagttttagtatctaatggatttctagttgtataataaccatattctggattaactaaacattgtttcataaaatttgcaattgaaattggtccaactgtctttatcatatttttcaaaataattgttaaattttcagaatttgttaatttttcgtttaatttttcagttttctctctatctgctaatgtaaaaggttgtggtggtacaataggtttaccatctaaacctataagttgaggattcttaacattttcatcagtcttactctcattactaactggtttaccatcagcacctaaaataatagatctagtgaaaacagtatttttaatcaaacttttacccaaataccctctataaacagaagttcctttgctgatacttctcaacatttcctaaatgattgtctctctgtatttacttacacacctatagatattaccttcactattcactctataaagaagcagtatataatgaaatgtagtaaaccatgtaaagacgcatcgaccccagaaccaacgcggtcttccttttttgcttttccttctttctttttcttctagatttactatggtgatatcggggctttattattgtcatggatttataatagagggagatgttctagtaaatggattgattattaacatatttgtttattatttcttatttcttttttacttttgctctttctatttctatttctaatcatacacgatttatatctgattatttactatatatattaactacaaagaacgttgttttatatctaatttttacacaattatcatctttcattatcattttttttactttacctatagacgtcaatcataattatattccacctcatcacatgataatagataatataaacatggatatgaatatgaataataatagtatcaataacgacatcaatcaaagaaattcttctgctagtctaaatagtctcaatctggaagatttaactttctataatatgcttaatagaactcgtgctaaattgaactcatatagtccattacgtttaaataccaacatcaacaacaacaactaccaaattcagatgtcattattacgaaataattcaagtaggactaaaatactacatattttttcagttttatcaaaatttattaaatatattggacctggtttaatggttagtgttgcattatatggatccatggtaattttagtagtagtattgcatcagctcaatttcagtataaattacttttctcattagttatttcaaatataatggcaggtttccttcaaattttagcaagtaaattaggtatttgtacaggtcaagatttagctacaaattgtaggaaacatttacatccacaattaaataaaattattaatatatttgcagaagtttcaagttgttgcaactgatgttgctgaaattattggtactgctattgcctttaacattattttcaatatacctttattatatggtgttttattatcaattattgatatgttatttgttgttatggcttatagacctaatggaccaatgttattgttaagaatatttgaaggttttgttagtttattagttttcggtacagttatttgttttgcagttgaattagcaaaagtctctccaacaactgattggaaggatgtagcattagggatttttaccttcaaaggctgtatttactgatataaagggattatatttatcagctgccttattaggtagtaatttaatgcctcattcattatatttaggatcaggtgttgttcaagcaagaatgaaatcttttgatattaaaatgggtcattatgtaccaccagtcggttaaaaaatcaggtggtttatttactttctctaatagatgatgaatgaaagtaatgatgatgataatacagaaaatgcttataaaccatcaattcatgcaattgatgaaacaatgaattatacaattgccgaattagttgtttcattaatatttgttgcattatttgttaatgcagctattttaattgttgcaggttcagcattatcaaatccaactgatgatgatggtgatggagctttagaaactgctgatttatttacattacatcatttattatcaactcatttatcaaaagctgcaggttcattatttgcatttgcacttttatgttcaggtttatgtggtggtacagttgttacaattgcaggtcaaatgattatggaaggtcattcaaattcaaatttaccaccaggaattaaaagaattataactcgtgtatttgcattaattccttgtataacggtagttttaattgcaggtagagaaggtctgagtgcagttttaaatggatctcaagttgttttatcattcatgttacctttcatttgtgctccattaatttattttacatcaaatagagaaattatgaaagttgaattatatagagaaactaaaaatatcaataacaatgattcaaacataatcaataatgaagtatttgaatttgttgaaatggatgatttatcagataagaaaatcttattatcgaataatattgatgattcacgtggtagttcaattgaagttggatcaacagatacatttgaaggaactaataatgataataataaggatccaagaataagaaaattcaataatgatgatgttattgtaaaacaatataagaatatgagtaatggtaaaataactacaatatgtgccgtttttgtttggattgttattacatttttaaatttctggttattaataagtatggcacttgggaaagatgtcccagtgtaatagtaacagtaaatcaaataaactctattatatcataatcaatatactatatactatataccctcttttctataattaaaatatcataacttaagttgctggttggaatatatgaccatggcgcaaattatgatcacagctataaataggacgcgtgaatctcttttctcgagttatttgtttacttactttctttcttcttccttctttctttcttccttttatcaacgagtaatcgttcaaatcacggtagggaaatatcctattatataagaagattttaaatacaaaattattaaaaaacatacatttatacaataccatgatatgaggttttctaatcatcattaaatttcaaatataaaatcatataaatactgaacaactgacattttttaattgctccaactcctttggaacattcaacttgacaccatccaaataccaactaaagagaatcaattttgcagctttgaaaattttaacactaatacatttattacagcagccaaaacatttcatacaaatatcacttggaatatacaaaggtgtaaaataaactggatctttaacaaatttttgaatttcagtatatttatccacatattcattttcccatttgatacatctcaatcttttagcatgaacatcataatacttcttccacttttcatcactttttggattacccaccatctgtttattgtattttatcaattgaattgaaagcattttgaactctttcaactacccacaagcctttacaaacacgtcatttccacagctaacaacccttctcttgaatccaccaatgtctcttttcccaaaaaccaataaaacaaaatcagcaaaaaattaacaattgttttttaatcaggaacaaattcagccaaatgaacaagttctgcaaaactgcaaataaacattggatccttgcagacatgttcaatcaacaaatactcatataacctataatttctactattgatattattgtgtactgggtatttgccgtatgaagagtttacaccaatcaaatgaccccttgtatcacgaatatcattattcaaaatggaattgatattaatattacaatcagaatgaaaataattgaatgttttaggtaaagaatttctaaaccttttctcaacctcatcagtttaaccaacttcccactaatttcaattcctcataatttggattgccatctaaaacccgtgatataccaactacatctctctcatcattaactctacgacgttttgcatcttcagaagaaacattgtcaccagccagttatcatcacaactaactcttttatttgattccacattgataccttcttcttctactcgttcttcagcttcaaaatcaattctttccagatcactactattcactggagatacctccctttgcagagaattattatttgaactaatttcatctgccactgaaaattgaataacatcaacatttccatctacaccacgatcttcaacaaaattatcctcaacaacatgatcttcaactacatgattctcaacaacattatcctcaacaagatcatcttcttttcttggttgatcaatcgcttgataaacactacgaaaattattgttccttgttctaataactttatcatttgctacaacttcatttccttcactttcatcatcatcatccccttttacatcctcaatataaccttggaaattaatatctttcaaagaattgataattcttcttatcaaaacgtcttcaacagggaattcacagcaactttcgtgttctgaaccttcaatgttataaaaactcaacatttcatctgtgaaacaatggctttttttatcaataaacatacacacacctttgccacgaattctacccataccttgaataaatgttacaacatctggaatttaagttatagaaaataaccaattgaacatctgctgaatcaataccattggaaataaattttgtaccaaataaaaccttgttattcgaatcacgaacaaaagaatctataactgcatccttatctggagaattacctgtgaactttcaatgcaacctctttttgatcaaaattatcaaagcaactctcaacatcagcaatgacaccacaaattaatcgtcttttctaatttaattaatatttagtttcattgtttcattatgtatttataatttttgattttcaatgttgtacttattaattattttgttgttcagacagattatgtatttttgttatattatttatttgcttatattatttccctttacacttcagttgtttgggattcgtatttatattggataaatagttctctgtctaattgattggtaattagctctttattctttcttttctaaggtagcctgacatcatgattatcctttcaaaattattcaaatatgcattaggtaaaaccacgttaatgctttcttgtttcttttaaaagaatagtatgagcttcatcgataaccagcaaacccaaataagacttatttatcaaaaaggttgtatccttgacattttcataagttcccaagtatacatcgtagtttctatctgaatttttgctgattatatgaatacgaccactatgtggaagattttttgtatcaactagttgtataaacagattatgtatatatcatgtatcgttaattatttaatattttttgtgtgaaaaactgtaactgtagaccaaatgaaaatctcaaaatttttttctcttaaaataaagatcaaatcttttttcaaataatttcccaattaaggtcttttttcacttttttcaaccaaaaacacatacaatgtctgaattacatgaactatgttatcttaaaacaagacctatcactaaggaaacttattttgatccacttaaaggatatttaaaagctggaatacctgcaacttatacccttgaagaagcatataattatgaaaatggaattgaagaggaacaatcaagtacaactactccaatgcatattatttgtgaaagtataccatcagatataaataaggatgaagaatcggttgttttacaaatgatggaagaattatggttaaatggtgcaggttggtgtttagttaatgaaaaaaatgaaactcctggttgtgttttacttagacgtggattacatggatcaaaatattgggaaagttgtgttgattcaggtgtacgtgctgaagttttattacgtaaattgaatgatccaaatgttgaatttttagatgatccaaatgaagaaattgaagaagatatcggggaggaagcggctcctgttgaggaagaagtgcctgaattaattgaagaagaagttgtaactgaagaatctcaacctgaaagcaaaaacactaaagaagaaagtgttgaagatatgtataatggaccagctggtgcaactgaaacatatttaaagacagaattagaatataaagatggtgcattagttacaaaggaaggttctgatggtgttatgatgcaatgggaagatcaattaatgaaagcaggttgtgaatcaatgttcaaatcaattgaagatccaacagatgttaatatagtaaatattggatttggtatgggtataattgatacaatgattcaatctaaaaatccatcaaaacattatatctgtgaggcacatcctgatgttttaaaaaaaatgagacaagatggttggtatgaaaagcctaatgttgtcattttagaaggtaaatggcaagatactttaccttcactattaactgaaggtgtattctttgatggtatttattatgatacttttagtgaacattatgaagatatggttgaagatttatttgatgttgttgttggattattgaagccaactggtactttctcattcttcaatggattaggtgcagatcgtctcgtatgttatgaagtttataaaaaagtggtagatattgatctctccaattacggattaaatgttgagttccaaagtctttctgcaccagtaactacattagaggaagcagataatagtgaagactctgtatggaaggatatcaagagagcatactggcgttgtcctgtctactaccatccagaagtaaggtttatgtcttaggtgtagtatattacgtaatcaactgtaattttttcaaaattttttttttgtcgacgaatttctaattatcatcgattttttgatgaagattggatgaagattggaataattatatttaagatttgatcttttcttctccatttttaagtaactgtagatcaaatatgtctttagaagctgcgttatctcttttatcattggctgaacctactccagaaggtgcattagcagtcaaatcacttgtttttaaaccaaaaactgctaaaactgcaactccaattcctgttattgtagttgcattaacaactactcaaactccttcaggtattattgcaaaatctgttgatgttaaagatccaagattagcaaagaatgatttaactactgaatttttcggggttgcatgcagctgatttctcaattgcaactttaaataataatcatactgatggtaaagttaagcttataattgattccaaaattaatgataatgaagaatcacaatatgttttagaaaatgcttcaggtaaattaggttcttaatggtaaacaattaattggtttcttatcaacttattctcctgttattgttgattttgaagctgaagctgcagctgctcctgctcctgttgctaaaaaggcatcctgctgctccacaacaagttaatgatgctaaattagatgatgctaaattaattggtgttacctgttgataaagagaaaggatttctcaggttggtatcaacaaattttaacaaagggtgaaatgttagattattatgatgtttcaggttgttatattatgagacctgcatcttatgcagtttgggaacaaattcaaaaattctttgatgaaaaaattaaatctgatggtgttgcaaatgcttatttcccaatgtttgtctcttcaaaagttttagagaaggaaaaagatcatattgaaggttttgcatcctgaagttgcttgggttactaaagctggttcatctgatttagaagaaccaattgctaattagaccaacatctgaaactgttatgtatccatattatgctaaatggattagatctcatagagatttaccatttaagatgaatcaatggaattcagttgttagatgggaatttaaacatcctcaaccatttttaagaactagagaattcttatggcaagaaggtcatactgttcatttaactcatgaggatgcagaaaatcaagttttaagaattttagattggtactgaagaaatttatagaaccttattaggctgtcccagttattaaaggtgttaaaactgaaaatgaaaaatttgcaggtggtaaatttacaacaactgttgaaggttttatcccaactactggtagaggtattcaaggtgcaacttctcatcatttaggtcaaaatttctctaaaaatgtttaacattactgttgaaaatccagaaggttcagataaaccaaagattttcactcatcaaacttcatggggtttatctactagagttattggtgttatggttatgatacattctgataacaagggtttagttattccaccaagagtttctcaatatcaagttgttgttattccagttggtgtaactgcaaagactactaaggaagttgaagaaaatgtttactcatcatgtagagatttagaatctaaattaaaatctaatggtattagagttacagctgattacagagataattattctccaggttggaaattctctaattgggaattaaagggtgtcccagttagattagaagttggtccaaaagatttagaaaataagtcaggttcttgctgttagaagagataccggtgaaaagatatcaattaaattagatgaattagatgttaaattaccagaattacttgatgcaatacacgaaaaccttatatgaaactgcgaagaataaatttgatgaccatagaattttagttcacgaatgggatgattttagttcatcaattaaacaagaagaatgttgttgttgctccatggtgtggtgttccagaatgtgaagatgatatcaaggatggttcttctagacaagataatggtgaagaatttgaagttgatgaaaaggctccatctatgggtgctaaatctttatgtattcctttcaaacaaccaaaattaaagagaggtacctgttgtgttagatgtaagaaggctagctattaactataccatgtttggtagatcatactaattgtgtttatagaatagtattgtttatatttttatagctgaaaaaattctaatttatgtttataaatgaagttaattaataaaaaaatattaaagaatgaaataaaaaacaataagaaatagatagagttgcaaataataaaaatgttcatataataattattatgtgaatataacctgaattaccaaatttggaattcatcaaaataatcaacactcttgtcccacttggtaacatgagatgcaagtgtgtgtctgatgctgtccatcaaaattggtggaccacatgctgcaataccaatggatgatgatggtgaagtctctaatgtttgaatcaatgagttcttcaatatttggtctgacagtagaatatcttgaaattaccctttgaattacttaaagctgtgaagttcagtggattccttttctgaattgtctgtactcaaatctgttgtttcagtttcaggtgaggaattgttcaatggatgtgaccctgctttcgccttgttctctggttatgtaaacttcaacatcaatagttgacattcttaagtaaattgtgatatgccttgataccttgtaatgtttgactgatccaaacttaacttaccgctggatacttgggtggcattctctaaaatacctggaacaccagatccacctgcaattaacaatgcttcatcatatttctttattggtgtagcaacattgtcctccagtatggaccttcaattgacaccttccatgtcatggtattgttgttcttcaataagcttgttccacattctgtatgtaacacccttcttaactctaatatatgcacataaattattaccttcaacaacaatggtaaatggatggttttcccaaaatatgatacctgcaaaataaatgtatccataggtacctggttgatgacgccaccatgtaggtttgggaacttcaaccttgattaattgatcaccaacaacggtaagtgtaggcagttctataaccgaaagcaaacatacgtatgacacgtagaattctatcaaatgcccaaacacaacatgtagcaatcaaccattctaaccaacccaatgtattacaatgccaccaacacatagcaacaaagataacagcaaaactaacatgaacaacaaggaaatattcataatagaaaactctaaatggtggtaatgcaaataataaaataagaccacagaaaatagtagcaataataccatacacaaaatatggctcagtgttaatgtaaagaacgtaataacctaatgaattaatagtatatgcaacatgagtggattaatgtatctaatgacatccaccatgcaagtactttatggaaatgaaggaaggtggaatatgaccagcctgtaatccataaaaggaaattcgtttctaccagcaaataaaactaagagtgggatcttaccaaatgccatgataccagtacgatcagcgacgtatctttgccatgcatgttctggagtaccaaaccaccaaccttctttatatctataactgacacaatagaatgcaatttgtaaaccgaaaaggaaaacatctgtaataaattgaattctgtttggaaggaatattgggaaccatttagaaccccaaaattgtgaaaatttaccatttggagccatagttggaaatataacatatttttgacaaagttttgcaaatgatgagttgttaattgattttgtgacaccagcatatcttgcaaaattgaaaattgtactgataacaatcaataataaaaagtatccacaaataccaactgaaaaccaagtacctgaatctaaattaaaataataagctttataaccgatatattccggacctaaagcagtaatatttggagtagatggataataaagtggtaaagagacattagtgatatcttcaaatggtttataatatttagttgcatttaaatattgagcttgataaaatgtccaatcttctaaataagaagaatatttgttacaagcagttgaagcatattcaaaaattttctttctaaaagcttctgatttatcatcagctaattcaacggaacaaataagaatggtaccaattgctggtggataaccacagataccatcataaattgatgaatatgaacctaacatcaagggtgtgtaatcaaaggtaaatccacttacacctgtattacaagtccaatactctgctgcaccaataccctgacccatggtggatttaatataggtagcagatgaactgcttacccaggcaaatagcaaagtcagcaattggaaagttaacattattgttatttcttgttagtaggaactgttctttaatctttgaaatatttaaaatagaaaaaaaaaacagagtaacttaaaacaacaaaaataaaagtttaaacccaagccctttaaatagctcttgaaatacttatatttattcagagcccaatcttctccttttcaatgattagacgaatttcgaaaaaatggggcatttgaaatacatgtacattagaaaatgtggagacatttttcaattgacctgttaaaatagtttgaatagcaaagcaataaaagatgataaatggaaggtaacataataaaaagccaactaaatacaaaattatcgcaataatattggtcccaatgaatttaagaaaagaaaatagggttcaaatcaaacgttaaacaagaatttactcaactgtttaaactgttgcaaatagttgttacacaatattttcatttttatgtccgatatctttttttagtgccttatgttttgcaaagacataaaaaataccccttaaaaatttactaatcatcgcttgcgtacattttatattattatacggtattgataattctagaagtattgttacattttaggccttattgttgtaaatgtatataaaagtagtacggcactattttgtttaaaacatgatatgatatgaaatgataagaaatgaaataataagaaatgctataagatagcatattcatcaaacactcattagtctgtatatgatattgtaataaagtgccattataagctatcatgtaagcttggtataaatttcaattgtagatgaggagggtgttaaacgaggtgatcattttactaaatcattaaaatcccgttttaagtcttgtgccgttgctcctaacgttcttgcctattattaatgagtgattttattttctaatcttctgttctattgtattgtattgttacttattctcagtttcttatttgataatctttgcacttgtcaaaatcaacattataatactttttgggtgtattatctattgtctattgtataacagagcagtaatactaaacttgttaacaccgtgtttccggatataagaaaatctcactatttttcaccgcttaagaaaaatttactattatgaaatttctacatacatgaaatttacataataaacaaaccgaagaatgcctgatttaatatttcctattagaggataagaaagataggaaactactaatgatattgtcttttcctagaaaacaatacttatcaatagctagatcattaagatggtcatccacttcatcttcaaataatctcccattatgtgtaaaagatatcttacaaattaatactaattcaacacctgttcaattaaatggttggattgattcctatagaatctctaaaaatgttgcatttcttgatatagttgatggaacaacttcagaatctattcaatgtgttgtacgtccgccatctttattacctaaaaatattaaatctggttcaagtgttaaaattgatggtttatggtgtgaaggtcgtggtaaacaaaattttgaattacaagtatcagataagaataatactggaaattcaaaaccttgcatcaatcgaaataatgggaactgtaactgatttattcccaatgataaataaaaatcatacaaataaatttttaagaggaataccggaatatagattgaaaaatccatcattatctgcacttttaagatttcgttcacaagttgagacaacattagttaattttttcgattctcaaaattttacgaaaactcatccaccattaataactgcatctgattgtgaaggtgcaggtgaattatttaaaattgaatctgcatcaaagatacctaaaaatgaaaaattctttggtaaagatgcatttttaacagtctccacacaattacatttagaagttttatctgctgcacttaatagagtatggactttaacaccttgctttagagcagaagaaagtgatacaaatagacatttatctgaattttggatgttagaagctgaaattgcattcatagatgatgttaatcaattaacaaattttgcagaactcatgattaaatctgttgttttaaacctaacaaataatcataacaatatgggaactaatcttataaacacggttgataaatcattagttgatataatgaaaaatagatggaatatgttattatctaagaaatggaattcaataacatatacagaagcaattaaaataatacaaaatcattatgataatgaaaataatacagctgagtttacaataagaccaaattggggagattcgttacaatcacaacatgaaaaatggttagctggtgaatattttcaaaatccagttttcgttactgattatcctttagctgaaaaggcattctatatgaaaattaatgagcctggaagagatggggaattggataaaactgtagcttgttttgatctattagtacctgaaattggtgaattgattggtggttcggttagagaatatgatttgaaccaaattaactgaagaaatcaatagaagaaatatggatatcactccattacaatggtatctgaacttaagagagaatggatctgtttcctcatggtggattcggtatgggtttcgaaagacttttacaagtatttaagttgtaccaataatatcagagaagtcattccattcccaagaagtgctaataactgtttgtgttaaattttgtaagtatacgccttgtaaataatatagaaacctttttaaatagaatttaatgaacggaaaaaaatatgattaaattaaaataaagctgtacaaaaaaagcattatgtattctggaaactaaaataataatgtgataaaataatgataaattgaaagtgaatattataaatgtgataaaataatgatgatgtaaattaccaaatttggaactcatcaaaataatcaacactcttgtcccacttggtgacatgagatgcaagtgtgtgtctgatgctgtccattaaaactggtggaccacatgctgcaataccaatggatgataatggtgagtctctaatgtttgaatcaatgagttcttcaatatttggtctaacatagaatatcttgaaatttaccctttgacattacttcaaagctgtgagttcagtggattccttttctgaattgtctgtactcaaatcagttgtttcagtttcagtgaggaattgttcaatggatgtgaccctagttttcaccttgttctctggttatgtaaacttcaacatcaatattgacattcttaagtaaattatgatatgccttgataccttgtaatgtttgactgatccaaactaacttaccactggatacttgggtagcattctctaaaatacctggaacaccggatccacctgcaattaacaatgcttcatcgtatttctttaattggtgtagcaacttgtccaccatatggaccttcaactgacaccttccatgtcatggtattgttgttcttcaataagcttgttccacattctgtatgtaacacccttcttaactctgaatatatgcacataaattattaccttcaacaacaatggtaaatggatggttttcccaaaatatgatacctgcaaaataaatgtatgccataggtaccatggttgatgatgccaccatgcaggtttgggaacttcaactttgaataactcatcaccaacaatggtaagtgtagcagtcctataaccgaaaagcaaacatacgaataacacgtaggattctatcaaatgcccagactgcacatgccgcagttaaccattctaaccaacctaaatgtattacaatgccaccaacacataacaatgaaaagaacagcaaatacaatatgaataactaaaaagtattcatagaagaacactctaaatggtggtaatgcaaataataagatagcaccacagaaagtagttgctgccacaccagtatgcataataatgcatcattttgcaaataatagacataataacctaatgagttaatagtatatgcaactgagtggattaatgtatctaatgccatccaccatgcaagtactttatggaaatgaaggaaggtggaatatgaccagcctgtaatccataaaagaaaattgtttctaccagcaaataaaactaaaagtgggatcttaccaaatgccataacacctgtacgatctgcaagaaatcttcgccatgctttttcatgagttccaaaaacattaccaattttgtatctataatcaacacaatagaatgcaatttgtaaaccaaaaaggaaaacatctgtaataaattgaattctgtttggaaggtatactgggaaccatttagaaccccaaaattgtgaaaatttaccatttggagccatagttggaaatataacatatttttgacaaagttttgcaaatgatgagttgttaattgattttgtgacaccagcatatcttgcaaaattaaataatgcactgataacaatcaataataaaaagtatccacaaataccaactgcgaaccaagtaccggaatcaatattaaaataataagcttcataactaatgtaatcaggttcaatagcagttagatttggaagaattggataataaagaggtaatgaaagattagcaacttcttcaattggtttggtatattcagatgcatttaaatattgagcttgataaaattcccaatcttcaatatatgaagaatattcagcacaaaagaaagccatatgtttaaaaatttttaatttcattttctcattatcatcaccaactaaaccaactgcacaatttaatgcagtaccaacagctggaggataaccacatataacatcattacgttttgaataagagccaagcattaatggtgtataatcaaaaacagagcttgcaacaaatctactacaggcaccaaattcagctgaaccagtaccttgacttaaatcagtatggaaatctgtactaactgcatttcctaataaagcacaaaaggtggccagcaaatgaacagacaacatgctttttcgttcttgatcaataaaacaaaaatttcatgaatcaaagaaaatgaaatatttagcttacaaattatagtaaaatatttggtaatagttaattaaaataaaatacgaacataacatctcttttaaagataaactttaaagcataatagaattgaagggcactaaaatttttgaaagtattgtgagtatgaatattataaaatatctaagcggtgataggtctaaaagttaagtagacagcaatagaaaggaaaaaataataactcatttgaaaagaaacaagagaagacggtttcaaacaactccgataaaaaccaacgtacagaaattatcgttaaaatattggtcccttagaataataaaagggtccaccccaatacgtttaaaaaaccccatatataattctgcataataaaataataaaagtggcccaagaacggaaataatactataatttactgttgccaacacggttaactccgatgtcttgcggcaatacttacatccacactttctggagttactattactaatgttacatgttgtatattataaatttctaaattgataatactctattattactccgttaagttatgacagtgacaccacactttgaagaagaagtaagttgcgctatgtgcctttatttagaccagctaaatatttataaaattaatatattaatggaaatgcttatactttaaaactatacaaaagataattaatagtaagaaattataaaatagaaagccgttctgttatatctttggaaaccatattccgtacctctgtgtggttgtaattagctcttttattgtaacaaaaccatagtataaatttatatatcaatatctttgacattatggctcttaaatttcttattggccctgtctaaactcttaatacacaatctatcaccaatgaattcaaaattgataacctccttatcaccttcatctttattctcatcattctcaatatcaattctaaatgtaaatcttgtctttttcttaggtatcattcttaaccctccaatcatttctcttgcagaatattttatctttaccttattattatcattcttacctatacttatattatctttccaattattcttacgtgcaataatcattagtatataactttgtgattcccataaaacaatcccttcaattccaatactatctgaacataaacaatgagttactgtaaaatatgctccaatatattcggcacttgataatttagctgtaattgtatcaatagtcttacatcctttaattaattcattaatataattattccataatatattcatttcaatataatcttcaattttcaatattttacaacaaatttttaaatcaataatatcttccatatctcgtatatctggattatttttgatcatcttactaagtttcttagaaacattatcttgatgtttaatagatgtttgtataaatttcttaaattcattctttgtctttaatttattaaatttattcgtggtcttcttattagaatttaaatttgataaaaaatcattaactgtttcattttccttagctatctttttatcattttcagctcgtattgctcccccatcagttgattcaagtactaaataatttttttgtggtccattaaatgaatatctttgttctaaaaattcaagtatttctccattaccattaaatcgtccacatctagataacaataaatgttcaaggacgttggatctgtccattatatatatcaatctttggtgtttattattttcaaaaccaaagtcttaatgtcatcgatttatagaacctatacaaaaaaaatttgcgacatgaatttcaaatatttttaatacgtgaatattacctaatcgggaatattatgagagcaacagggcaactgtcagttacaaatttgaatttgagggctcattcccaaattttataattctgcactttttcttatactgattcttctatagatatacacagatcacgcttaattaggtcctatcattacattcttacttgagtcatcttataaaaggtgctaatgcaccacctagtgaatgtccagttaaaacaattttgtaatttgaattttcgtttgataatttcagcataggaaataaattgtcatatactagctttgaaacgtcatagaaacctttatgagcaccaaaacttcaaccatttttacttctgctaaaaggatgatatggaataggagcaaaattaaaatctaacaaccattcagtattagttgttgtaccttttattgagagaataatttctcttctataatcatctttaaaaattacaccagaaacaataccacaataaatcttttcaacactgacaccagaataagaatctgtacataaagtacataaacaagcatcttttagattacctaattttaataaatcaccctgtgtaagataagaaagggaagcgtaatcagcagctcttgccattgaattgaagacttcattactaattgaactagcagagacagaagtatcattccaaaagtctgatgtactgttgataaataatgtgttgataccggtggtgaataataaaatgatagtcattaattgaatcttggtataaatatgaaatcattagaattataaaagggaacaaaccaaattcgtcaagaaattgaaaattcaactaagtgaagacatcatcaaaaagtttttttaacatgacagaggatcttaaaaatcaaataacaaatagaagatatagttttatataattcattaaatttaacctatatgtgacttttctattcctccccatgagacgagaaaacaggggggctggaccgaaactaatgatacaatgatgaaagtgtacatgcactgttaaccagtgacatttatgcatagaatgtttggtcataaatataatcaaataaatattcaaagtgaaatatttttggaaagaggtattttgaattataattctctggagtatcaaaaggtttcaaaacttatccttccattcattgaagataagtttgaagttgcattgaatgaacagaaagataaacttgataaggagaataaaagaattagcaaatcaaattttgatgctgttgatttggctttggaaaatgtcatagagttgtttaaaattctaataaaatatttctcagaagacgctattcatctttatgtatctaatgtttggtgggagcagctagatgtttccattccaataaagaaaaattttataataataattttgaacctactttattgcagtataagaaattcttggatcctacaattttatcaagcattcaacataaactttttaaagaatctgttgttcaaatttcagatgttgaaagttcattaggtactttgcatcatgttatcactagttataagaaggttttatcaaatgtgaaaacttttggttctaaatgtcaaaagatgatagtcctttacttgaaaaaaaaagggattgatgttgaatgaaaaaccaaaccaaaacctcatttaaacccattcccaaccaatttttctcttaattgtaagtaagagtattattcacttggttggtaaatgggtttgaataaagcttttgtttgttgttctgtaattcaaaagaaaagagatgagcattataagaaaataagatgagccttcctcagtggctttttttatacacccgaattttctacttttaactttttaaaaattgcccctttttattaatagcttaataggtatcatttaaagtaaagtgttagttatagtaattgtatagctttttcagtgaccaaaccgataaatttctctaattatttaatttgtgtaactaatttttatctttcagtaagatattattctaaaaatttaaaaactatctctttttacttaattcttttgttttttattactttttatttttaacataaacacccaattttcttacccaatacttactctaaccttttcaaactttaaacacatattctaaaccttctacttaccccactaaacactttaaatctccataattccatcaaaaattctgtttttggcgcccaggaaatccgcacctccactacgagaattgaaacctataaaacactaattgtaaagtattaggaggatattgtagattgtgtacgtaaaatattacgtaatcaaataattaatacttatgttgaatcttttcaatacaataaagaattataactgtaactaattgtacttaatactactatgcgaatactgtcggtggaactggtatgcgagtagttagttcagataaagttagataataagttatccaaaacttgttctatctaaaaccaactctcatatattgagatgtcccgctcaagagagcttatacatgttatttatatactttaaagaactgtaattaattatctcacaagccagcccgattctccatgtggggaatctattattcagttcttagttgtaatataatgtgactaaatcaattagtggagaagttgtatataataaattaattaatgatcccatcccatcatttttcataaccgttgattttctgtcaacattggtttattaaattattcatcatatttcttcattaaatcttatttccattaatctctttgattatcattattattaaagtctatccttcagactataccacttgtaatgtctctattgattataatatagatattcactttatatcactaataagcttcatattacttacatcctcccgtctcgggaaacatcgtctcgatgttcactttgtgatataattgttgtaatttgataatattgattcaaaatttatttagtataatcaatttgtaatcagattaacactataatgtgtctttactgcaaaattcataaaatccatacgatctgacacgtattgaatctcaaaatcatattgtgctagaaaattgtaaccacctagccttaaaatttatttattaattcaataagatcttggtaatatttccatgtaagagatataagagtcattaattctcagtcatatatggagtaatatacttccttccaatttccttgaactataaactctaactcctctaccgtaataacatttgttaaattaatttaaactaaatcctaataaagtatattaattaataattggattttatgagtatatcttctttctagaagtaaatcagtaggtatcatttttaacaacatcaaagaataatattgatcgtaatttaacatacaataaattttcatatgtctctaattcagggattgaatggcaatttcttatcatgatcttcaactatttgccttttagcctttttatcagccttggtatggtggtatgtaccagataaatatagttgagtaagtctaaattcaaagttagatttgaattctcattgcagtgaattaaccaaagaggtaatcatatttgaggttagtaaaggttataatatacccttcatcgtgtctaaattgagttatacttacttcggaagatgcggatgcacgttgctctgcagttcctattgattcttctattgaaagtttatcacgataagtttttaaaacaatttccaaaagataaaaaatcttaagtctctctaatggtttcattttatttcacaaagcaatggaaaattataggatatcaacctgttaatgtatgccttagctttagctagtaaaaaaaaattataatttataatataagcatattaatcatgattcaagttattaaattagcataattattttaatttgcctctgaatataggattttaaccggttaagaattttcatttctgatcattaagtcttctgaccttttgatgattgttatcatgggaactatcttcttgataattttcagcagtatattcacgattgtgataataattattagaatttaaatgtggattttgtttgaaacgagattgtttgaagtttgaagttttttcaacacgctcagcggcttgtttaagttcatgataatttgagtatggtgcattttcaatttgttctctgatgtaagatggtaattttattaaatataaatccatgacaaagtctggttttaatggagtttctctgttcaacaacaatctttcaaattcagcattaaatttaggaacagtatcatcagaagaaaattgtaattgacatatagaataattattttgcctatttgcaattgaagtattacaatattctttattaaataatttttcaaattcgttccagtttaaactatcatcttcagaatctatacttgataaccataaatgagcagatcctttaaggcctattctcacatagtgaattcttaaatcagttggaattctattcatcatcataatttctttgaatgttgacaaccattcctgtgcagtttgtttaagttttgctgcatcaacgaactcatcacgttcatttggattaccatagaacttattaatatgattatatggaatcattttaacttctggaaaatctgagacaactggttcctcagacggttcaactgttggagtttcagtttgatgaatattttttctggctctaaccattgtacttgttaaattttttaataatattcttcaattgtattgacctaaaggtgctaccatgtaaagtattaggaggatattgtagattgtgtacgtaaaatattacgtaatcaaataattaatacttatgttgaatcttttcaatacaataaagaattataactgtaactaattgtacttaatactactatgcgaatactgtcggtggaactggtatgcgagtagttagttcagataaagttagataataagttatccaaaacttgttctatctaaaaccaactctcatatattgagatgtcccgctcaagagagcttatacatgttatttatatactttaaagaactgtaattaattatctcacaagccagcccgattctccatgtggggaatctattattcagttcttagttgtaatataatgtgactaaatcaattagtggagaagttgtatataataaattaattaatgatcccatcccatcatttttcataaccgttgattttctgtcaacattggtttattaaattattcatcatatttcttcattaaatcttatttccattaatctctttgattatcattattattaaagtctatccttcagactataccacttgtaatgtctctattgattataatatagatattcactttatatcactaataagcttcatattacttacactaatataactagttgtttggtctagtggttacgacgtcccctttacacggggaaggtcgcgagttcaaacctcgcatcaactaattagctgtttatttttttaattttttttaattttgttacttacttatacatgaacattgctatttacaatttaccttttgaatttttacttttcaaagctattgccttaaatgcattttgaggtctttcatcaacccatcttgataatccattcatactttcattaacaatttgtaaattaacttgatcataaaattgtaatttaattaattttttattttcaaaaattgaatcaaatgataaatttttagataattttaataaatctttaataactgaattattaaaattttcaattgaatcagttttaaaagttttagaaataaatccatttttaattaaattatcaagtggtattttttcagctaaacatacagcttgtaaacttgttgttaaacctaatctataaggtaatgaagcagaaacgccacattcattaataagtccaatacttgagaatgggaattgaatataacaattattattaatatttgaatcttccctagcataaataatatccattaaacaaattaatgcagcagttaaaccaataactggaccatttaatgcaacaattattaattttttatgatttaaaattctatgaacaagataaatattttttgaagaaatttcattaaaatattctaattttgatttattaattattttagagacatatttaatatttgcaccagttgaaaaaaatttaccagttgaagttaataatgtaattgaagttgaaatttcattatctgctttatcaaataaatcagccaattcaacaaattctggaattgtgaatgaattcagtgaatttgcattatttatattaatttcaaaaattggacctttaatattataatctaacgtcattgctagttgtcatcaatactcatttttacaatacgatatatggtggatattcattactatttatacttgatattagaatgtgggggtgattttatgatgattaaataatttgtggggctcggtcgaataggggtaaaaaattattttcattatttacatgatcaagttatctatctatacttactatttatttatttaaattaataagatgtttaccatatttctttaaagcatccctaatttcaacaaatgaacctttactaccactaacacaacctttaactaaaatataaccattatctgcattacaatctaaaatttctaaattaaagattgtatttctttcattacctaatctacctgccatttttttaccaggtaaaactcttgcaggtgttgtattttgacctgttgaaccagctgatctatgagattttgaagcaccatgagatgcattaccaccaccaaatccccatcttttcattacacctgccatacctttacctttagtaacacttataacatcaacaaattgaccaattttaaaatgatctgcctttaattctgtacctaaaggtaataaattttcttcatttaaaatttcaaaatctgataaatattgttttggtgaaacttttgcatttctaaaatgacctaacattgatcttgtaacattttgaggtttttgataacctgcaccaatttgaattgaattaataccttcctttgttaaattcctcgtaaatgtaacttcattttgaataatttctaaaactgttgcaggtaaacgacgaccttgattatcgaaaaaacatgtcatacctcttttaataccaattaaacctggtctctctaataaacgacgacgttgacgtttactttccttattacgtgaagtaattggagcatttgaatttatataaggaataactgaaggtgaaattaattgttttgaagatttaagttcatttaaagcagtagtagcattagagatactactctgagctctcttaaatataaaagacattgtctataaagaagtatattatatctatatacctatacctatacctattctattctaatattggaaaatgtcaatgtcagtggaaagtgaaaaatttattataaagagagactttaaatatggtgtacagatcttatcatagtcgcgtctgtgggtctttttatttttcatattttttacttcaactacatgaatggttaatgggattaattgtttgctgtcttttgatgatggtgctttctttcttttgacaatatcccccgttgccattggggggtattctccacatatgtttaggtgttgaaagggtttattaattatcaactaatgagtttcttaaattttctcgtctatcctgatgttccaattgaagtattgtagcatcaatcatattaacgtgaaattcttttgcattgaataaccttttcacatacgtaaccaaatttttatcacttgatacatcaaaacttgaatagccgaaaattaattgtgaaggtgaggtgtcaaaaattgtagtggaattattatagacattaactgcacggaaaacataaataagccaatttgccatagtttgatcaacagatttcaacacctttttaattaaaccattgactctttcaactctactattagcttgcggataatattttgaactgaaatgccatttaatattgaaagctttagcaaattcttgagtactttcagcaataaaaggagttccattgtctgacacaatttcatttggacaagggtagtatcttgttaaattgactagaaatgaaacaactgtttctgaattttgatataccacagggaaagcgacacaataaccactcacgtactctacagcaactagaatattgaaaatgagagacaccattattatcgaaataaaaaccgacatctaaaagcggaccgacaaaatcaatatgccaaacttgaccaattgaaggagttttaatctgttgcaatggagcagcaatttgtttgaatcttgtgaataaatcacaatgttttcaattcttgacaatgatggcggcaacagcttttgcttgtggataaaaaatcttattttcagcagctaattcaagtaaaacctttggacttccatgatacttatgatgtttttctaaataaaacttggtaaattcagcagtagaaacaatttatgttaaaataaagttggttgaaataaatataattgaaataaatataattgaaataaatataattgaaataaattttgaataaaataaaaaatgtaaaattgaaattaacattatgttgaatattctttgaaatacttcttgaataattttctttcttcgtttcgaaaagctaatgaataatcactaatggatctaaatggggaaccataatgttgaaatgctggacgcaaatgttgcaaattatatgtacctggaatttgttttccatgaacatcagttaatttgtatgaattcttatctaacatttccgaaatgacaaaaggaccttcaaaattaggattagttttatgatgtttagccaacttcttggtttgaacatatatatatattcaccaactgaataagtattatgatttgcctttggatcatttagtaatttcaaattttgtctagcaatgaatcttttgtcaactagactatttctttctctctttttttaagtttatatgtatactttattagattttataatgaactttaaaaaaaactaaacatactgtacactcagtatacatgctataaatgatatgaatattaaaatgaatatgattataatggagtataagggaaatcacaatcatttgtactttcatcatcttcattaaagaatcttttcttcatttcaacaggttcttgattatcctcttcaggaacataaccttcctcaccgggtttaatttcacctttaccattatttttccaagaaccaccaaattgatgccaaacataacaatatttaccacaattatgttcaggatcttctctaaatgagaattttggataaataacaacatcatcaaccataacaggagctgataaacctgtgaaaaatttccaagaaatcatttcatttggttgaggttcaggaccatataattcaccttgaaaatatctatttgaatcaatatcaacaattgttggattatctaaagaatttaaatgaccatatatagtatcagtccaaacaactggaccagtccattccattatatcaattgatgaacatttatcaacacctttaaaatctttataataagcttgtaatttattattttttgcagcattaaaagttgtttcaacaattttagcaattaatttttttaaaattggatgtcttgcctttgccttaaaagtccattgttcaaattgtaatcttctagtcatataatgttcccaattttcaacattcatatcttcttcaactgcaacaacaaaacccacatttctatcagaatcaaaccaaatatcaactggtttctctaatttagtatcaatatctgaataaacaccaccgaaaaggaaaataagtaaatatcttgaaaaatcagattgaataattttatttggcattaaatcaaaagcttcaacaacttcaggaactgtatttgcaaaatgagtaattaaaatatcatgaatttcagcatctgtatataaattatatttataagttggattttcatttttccaaagtgaaattaaatctctatttgggaaatctggatcacttgcaggtactttccacatttgaacgatatttttatcaattcttctaggagatgcatcataagggaaataagttgataatctatccaaagtagttttataattataaggatttgcacctctcgtatgaggattaaatctataaaaattagtaattgctttagaagtttctgatgaagataattgattaattgaaaataataaataacctaaaaatagaccaacaattatagaataaattctaaaacgtggtgcattggtaacattcttaccaaatactccagaataagaggaagacattgctaatagaaggaatataataaaatcaaaaagaaatcaacatcaaaatcaacatcatacaatatacaatacagaataattcatggaaatggaaatggaaatgaaaaagcgtgttcactatattaagcaacaaaattcgcgattttccaatttttctttctctttttctttgattttggctattttctaaagaacagatatagttttgtacctgaaagtatatctttcttttaggcaatggcactggttgtaaggagatctagagtattgatactctttatcttagctttgatagtggtttcaactcttcttatatctaatagtaacagtaaatatatagatgatttaaaatcaaatgctaataactatttaaagtcattagataatagtggttcaaataataagggttcaaataatgatccaagtatggaaaatttcgatgaaactaaaccattatatgattattcaagagatgaaattaatcaaattaattcaatttcaattgattcattccttaaaggtgattcaataattcatgatttttttgcaaaatttttcaatttattaaatttaaataaatcaaattatccattaaagagaagaatgaaattagatgataatggtaaaccttttattgatgatgttcattttttcgataatgaaaatgaattattaagtgaaaatagattattagaattattcgatttcccaaatgatttcgttaatgatttaactattaagcataaaaaaattattaatgaaattccaaattttacacctaaattttataaaggtgatggttatgcaattgttggtggtggtaaatattcttggtattcatatcttgcagttaaatcattaagaaatgttggtgcagttttacctgttgaagttattttaccaacaagtgatgattatgaaaaatatttttgtgaagatttattaccatcacttaatgcaaaatgtgtttcaatggaaaatgttttcggtaaggaaattatggaaaaattaaattttacaggttatcaattaaaatcacttgctttattagcttcaagttttgaaaatattttcctcttggattcagattcttatgctgtatcaaatcctgaacctttatttaaaagtgatttatataaaaaatataaaatgattacatggcctgatttttggagaagaacaacatcaccaatttattatcaaattgcaggtttagatatttcaggtcctccaattcgttttattaatgatgttttcactgatattgaaaaaattaatttaacaggtgataaaactgcagatcaaattgatattaagaaagattttaatttacatgataggaaaaatactttaatggattggtcaacagaatctggtgaaatgttattaaataaaaatattcattttaaaactttattattggcattatattataattttgatggtccatatggttatcatccattattatcacaaggtggtgcaggtgaaggtgataaggaaactttcgttgcagctgcaacttattttggattaccattttatcaagtttataaaagagctgataaaactcatggtttttataatcacttaaacacatttgaacatggtgcaattattcaatatgatccattaactgattataaaaatattttaaaaattgaagagagaattaatcatgatatgaaaattaagaaatcacattttaaatatgattatgccaaatatttttatgaaggtgataaaattattgattcagtaccaatgttttatcattgtcatgatccaaaatttgatccattctttttaattaatgaaaagaaaatgtttgttagagaaaataatcaagttattaatagaagacgtagaattttaggtgaagatttcccaagaggttcaattgatttagaattaagtttatgggaaattgctgatgcatcattatgtaaacaaaagatgaaatttacagttttcgaaaaaaatgattttgaaaatttttgtaatattgaattaccaaaacaattacaatttttaagagatagtcatgcattaattatggaaaaatataatagtgaaactccatatgaaaatcttaatggttcaaatgatttatttggtgaaaaaaataataataattagttttgtgtatttttctaataataataaattattctataataataataataatacttactacatcgcgttgtaatgaaatttttcactcttttaagtactatctttactttatacaaggatggctaattcaaggtttgaatatgttaaaagttttgaacgtgaaaatatattattaccacaaacacatataattattagagttgatggtaaaggatttcataaattttcagatttttataatttcgaaaaacctaatgatattaatgcattaaatataattaatttatcagcaatgaaaatgatggaaacattccctgatataattttagcatatggagattcagatgaatattcattcctcttaaagaaaaattgtgaattatttgagagaagagaatttaaattaattacaacatttgcatcatttttcagttcttattatcaattttattggaatgctcaaaattcacctgataatcaacttaaaattgatagattaccaacatttgatgcaagagctattgtttatcctaatagagagaatattattgattatttttcatggagacaggttgattgtcatataaataatttatataatacaacattttggatgttagtccttaaaggtggtatgacaactcaagaggcagagaatagattaattggtacattaagtagtgataagaatgaaattttatttaaagaatttggaattaattataataatgaacctgaaatttttaaaaagggtacaatttatgtacgagaggttaatgatttccccataggtaaatatagggaaaatccaacaattgataatttacaacgtatattgaaaagaaataaaaagagtagtattaataaatatcattgtgatttaatcaaggaaagtttttggaatgatagaccttatttatttatataaatataagtataattatgtacagttatagaagatgaacttactctattgagcaaattctttaccattagttgaaatttcttctcttttaacaattttagctgcctttgaaggacttggccattgatcatgaagtatacctgcctttttcaaaaggaaagcaacagtatcacttggttgtgcaccaacagatatccaatatttagctctatcaaaatctaatttaatatccttcactgggataacacctcttgatgacatttcaggtgttattggagtcggtacaggattataggtaccaataacttctattggtaaaccttgtaattttcctctctttttaccaacggcaatgttatatactggttgacgagttctaccctttctaaccaatctaattctaactaatcccttcattgtctataggaagtaaagtaataccttaacttaatagaagatgtccaataatcatcatgaaaatattcaacatgtaaaaaatgagacaccgtacaccaaaagaggaagtaaaaaaatttttatttttttatttttcttaacatgtaagaatttttcacttgttttatttaaagatctattccattttctttactttggtaggcaatatgagcactatggatgatgctaagacctgatcatttgattgccattatggatatggatgataaattggccgaaaattagaagtcaaatcaattctaaattagaaaatcaaaaaaaattagcactagtgttaactacaattgaagataatttaaaacaacaaaatcaatctgcaactccaattacttattttatctcatttttaactttattagatcaatgttgtgttaataatgaaattaatgatttaccattggctacttgtgctttatatttcttagatttaatatctcaatatactcctccaaaattattaaattctaaattttcagatattttagttagaattgctcctgctttaactaatgaaaatgctgatgctccattaattagatcttctattggatttttagaatctctcttacttgctcaagattggaaatcttggaataattcaaataattataaaatttctccaaagagagctttatctgctcttttagatttatcacttgatccaagaccaaaagttagaaagagagctcaagaagcaattgttaatattttaaagaaaaatccctaattcaaattcaaattcagattcaaaaattaagaaagatcatccagctgctaattatgcaagtgaatttgctttaaataatttaattactttaattaatgataaatcaattactaaatcaaaacatcaatcaaaagattcttcaaaggaaatcatccgcaaatccttcaattatacataatttacaattaattactttaattacatcatcaaattcttggcctttaaagcaaattactccattatgtgatattcttttggaaatttgtaaaagtgctgatcaattcttaatttcttcagcatttgcagcttttgaaggtatgtttaaatcaatgactaatgaaatcgattcaactaaatttatacaagttttagatataattttcgatttgaaaccttcattaaatgatcctcatttagctccttcttggttagcagttattgcaaaggcagtttcatcattttcttcaaatattaattcattggaaattttattgaaattaccaactattttcaaatctgttggttcttatttcttaagtgaaaattcaaatataactgaaagtgcatctcaatgtttaattgcaattatcgttgatggtataaatgataaagatttattattacctccaattgttaatgatgaattatttggtaaagttgataaagttattgaagaaattgctaaagcaacaactgattatttaactgttagatatagacattccgctaatgatgtttgtgaagttatatccgctttatttgttaaattaagaaaaagagctaatccttatttcttatcacatttagaattaattggtaattggagatcaaatgaacaagaaggttttgaattaaatgaaatttcagaaaaagttattgcgagtgcaatctcttcaattggtcctgaaattgtcttaaatgttttaccattaaatttaactgattctaaaaaaattggtagagcttggcttttaccaattttaagagataatgtttcaatgtctgaattaacttattatattaataatatcttaccaattactgaatttttcaataataaaattcaatcatcaaataataatgaatctgttaatattaaaatttttcaaacaattgttgatcaaatttggtcattattaccatatttctgctttttaccaactgatttacaaactgcattctctgatgattttgctgctaaattatcaggtttattatatgatgaagttcatttaagaccagttatttgtaatgcattgaaaaatttagttataactgaaagagaacgtgcaaatgaaactagtgaagaaactgatgttatacttgaacaacaattcccttcatcaaaggcaaaatctgatttagattatttatcaaaaactaaggcaaataaattattatcagttttatttaatgttttcactcaaattccaatggatcaaagaaattatgttgcagaatcaattgaagcttattttacaatttcttcaatggatgatatggttgcaacttttaataaagtttgtacattattaagaaaagctttagatgatgaattaaaggatggtacattaacaaaggaagataattctaaaacttcaagtgctagaaattcaattccaaaattatctgttacaatgatggatttaattgttatgatgactaaatatattccatcagattctcataatgcattattaacaattttcaatgagactgttcgtatagaaaattctcaaattcagaaaagatcttatcgtattatttccaaattattagaagataatgaatcaagttcttcaactattatacctttaattcctaatattatgcaagttttcattgaaacttcaactattactttaccatctgcaagagctcaaagattagaaggtttagaaaaattaattaaattattaccaaaggattcattacattatattacaggtattttatctgaagttattcgattcaactagaagtgcaaatgaaaaaacaagaactacatcatttacattattaattcaaattggtaataaatttaaggaatgtcaaggtgaaattgttaaaaatactttaattgattctgaaattcctaattctcaagcttcaattcaagaattatttttaatgtgttgtgcagctgcaggtcctgaaaatcctcatcaaagaagtgcagcaattactgcattatcatgtattttctatgaatttcataatgatttagaaatttcttatcaaaaggaattaatgcaatttgttgaagttttcttacatcaaaataatagagaagttattaaaccaactttaggatttatgaaagttgcaattttatcattacctgaagaagaagttttacctgaattaaagggtttattaactgaatttttattaattaatacaaatcataaaaatcattttaaatcaaaaattaaacatttaattgaaagattaattagaagatttggttttgatgtaattgataattatattcctgaagaagataaaaaaattattaatggtattagaaaggcaaagaataaggctaaacgtacaaaggcagcaaattcaaatgaagaaaatgatgatccaaatggagcaggtaataaaacttcaagactttcagcatatgataaagcattatatgaagattctgattctgatgattctgatgatgaaggtgaagaaacaaccaaatccaacaataataataaaaaatccaataaatcaaagaaatcacaagatcgttttatttctgaatcaaaggatgcaccacttgatttattagatgaaaaggcactttcacatatttcaacttcaagaccaaagaaatttagtaagaagaatgttgaaaaattaacaggtttcaatacaaagaatggtaaattaattattaatgaaaatgaaaatgatgatattttatcaaataaaaattcattaaatgcatatgttgaagctgttaaacaaggtccaattagaggtcaaaagaataaacttaaatggaagaaaactggtaatccagctgatgaaattgattggaattctgatgatgaatcaaaaggtgataaaccaaagaatggatttaagagtaaaagtggtagaattggtaaatcacaaccaaaatttaaatctaagaagaagttttaatttatggtgaaattcgtcatctcttttatagattcatattaaaacttatcataatttacactgttttgtttttacatttgtctttttcttaaatttcttttctatacaaaaactatttttatatgtacatactaattagtaaagttttaatttattttttaaaaaaaaacatcatttggaatgtaaattatccaaataagtttaaatcatttgatgttgcatcatctccttgaccatagagatcgagatcttccatttcatcatcatataatttatgatgttcataataatcataagctgctaaacctgaattagtattattgttgtaattattatcattattattacccatatttatatcattattagtaccattattattgttctcattaatatcatttatattataatcattatcactatcactgtcactatcatcattttcatcatcacttttataatatgggaatgtatgtaataatttttctgaaattggacctgcaataataaaattaattattattattaatatcatttttacgatcatcatgaatgactttttgtaaatcatttggtatataattttctaaaactgtacctttaaataatgttggtttaacattattagtttcagcatttttattatttgatgtacttgttaaatttgaatttgaagctcgttactgcaactccaccatttgaattagtttgtcttatattatgtttttgtgttaaaaggtacgattgtaatttgatctcttattaaatattgaatccaatcttcctcaattgcactttgaggtatttcataatcatcttcctctaaattatcatcattactgttattgttattattattgttaaggttattattattattaccagataatgaactaaattgtagaaaaggttgagccgttggtgttaatttattcatttgtgaaggtgatggtaaatatggcattgttggatttaataattgtgcttgttttgattgttcatctaatgcttttgttaaactatccattttagaattaacatttaatgcattaattttagattttttacgttcctctaaaaattctctatttggtctaccaacttctctcatacgttcatttatttcactattaaaccatttctcaaaattatcaataccttttaacgttataggatttttactatttttatctaatttcttattcggtgtgaaaactcctaattctaaaaatgtcctacttaaatcttttatattaggatgataatctcctcgtaattccatatatttaacaattgttttaactaataaatcaatatatctaattgcaatatcagtgaaaatttcaataattctattatttgcagctttatcaaatccttgtgcttttaacatttgaacaattgtcatttccaaaagatggaaataaaatctatgctttgacatagttagggttggtatataatgtatgttatgctgtgataaaaaaaataagataattctataaaacaaattctcttgcaagttgttgattttataaaattagatgaaaattcatgtagtgagatttgagaccttaaaatatgcaaaataaatgatccctagcaggatcgaactgctgatcttggcgttattagcaccacgccttaaccaactgggccaagggatcctttgttgtgaggttattttattggtggattttcttctaattggtttataaaaatggccaccccgccataatggcttttaagctcttttgaacacttctgaagggttgtaaaagtgttagtgaacggtagaaaattttaaatttcaaaaaaatctaaaatttgtaagatttgttgaagattttaagttttgccagaactaccaaaatattaaatacaagcggtagtaaggagctttttaagagtggacagaacaatgtgtaaagtccaaaaaaaatcaacgtttttattattacttacatctatctataatgtaaacaaactattctatactattctatactattttcatcacttttacttaaaatatcatgtaatttaacaaatctatttaactctacctctatcaaagcagccttaatatttctttgatcttgataatctttaaattcaattaaattccttaataaaaaattcttcattctatcaattgggaaattatctggtactttatttataatttcaacaaaattatccattctttctattgttgttgcatttgaatctgttgagtcattaagtaaatcatacttattcagaaagttatcaattagtttagtttcattggatttaagatatgaatcaaatattttctttaataatatttcagttgtttttctcttatcattattattgtcattattttctagatcatcactcagtaaagatgtagttttatttttcatatcaacacttttcaaaatattctcatctattcttggtaattctaattctacagcaaatatttcaacagttgaataatctttcaattctattaaataatcaactatttcttcatattgggcagatttaaaataaatcataattgtaattaagggaagtttattcaatgcacctatcattattaattaattccttacatatatcaataattgattgttgtgttaaaatagatttcatatcacgattcatattatgtaataacgtatacaatttatcatggtatccaacaagtggcgatcctttaaaatcaaggtttttaataatattccaatatttgtaaacactaagtttaggaatagatttctccttatattcaattattgatttatttaaatttttttcaatttttgaatcattttcataactaaacattataatttttaaataaatcagtattaaatctccaataaattgtttctcacacttaacttcaacaatatattccaagatattgtaattgtaattcatttttttctttattatttaatttatcattgttatttattgaattgataattttcatataattaatatctaaattattaatcttttcctccgttattaaatttaacccatatttaggataattattcaataaccattccgcgtatctttcaactatttcattatcttcaatacaattagtataaatataattgaccaacacttgtaaaggtttattaaaatctgaaaaaattgtattaaattcttcatctttaaaagttccatcaataagtcctttccaataatataaccattgtctatgatttttcaactgtgtataaaatttagaaagaatataatattttttattcaataataataattcaattacttcatttgatgaatatttaatttcatgtattattggttctaaatcttcttgatttataattgcatttttaactaatgtaacttcaatacttttcttaattaaatcattttcatttttaaattcaacagttaaacatgtattaaggtataatttaaaaaaatcattcatttcaagatttttctcctattttctttagttcttcaacatattcgaataaacattggaaagtccaaactgaaccgtaaattccatttgatgattctgattcattagtgaagatataaatcattagtcttggatctaaatgtttaaaattagatacccaaacatcaaatgcttgatcaaataattgatattttaaactgaataatgccattaaagtaattaaaaatacacttttattatgtttagtaaattcaccaactaatttatcatgaatattttgtgcattatttgaattagattcactgtacattttcaaccatctatcaatttcagatattggttttaatattttgaaaacttttccagtggaatcatataataaacatgatgatgtacaaaatgatttctttaatgcattatctgattcaattgctattttttcaatttcttcattagtcatggttgaaacaatcggtgcaagagttatcttagatgttaattcattatcatctattcgaaatattttacaagttaaaccagtatttaatttaatatcttcatcatttatagttattgtctgtaattttgtttgatcatatattgagaatatttgtatattcatttttaataattgctataatatagggtaattgaatagatattgaactagggtaatgatcgaaagttaaagtacctctaatgacatcaccatttaaattaataaacatccccattgcaggttcatctaaattcaatccaccacttataagtaatatttcatttttatcaatatattcaataatgggtgtaattttaacattttcatcactcgtagaagttgatactgggaataatggaaagtttctgtgattttaaaacattaattaaatcataatctttaccatttgatacaattgcaaaatctcctaattggattcctttaataacatcactaaattctaattctttatgtaatcttatactatcatgaaatatccttaatagtctaatagcttttttagtaaataatgtaatattaataaatgattcaccataatattcttcctttttaacgatataattattttctttcttatctaaggtaaaataattccaatcaattgatatatccattacatctttagccttaccgatattagcaggtgataattcaggtaaaatatatccactcattgaattaccacaatgaattaaagcaattgaaatttcaggtaataataagattttcttaattggtttagagacaggatgaagaaccaaatttttgtttagatatttgaatataacctaattcatcatcaattttatataaatgaatgatttcaccaaggttagtaccgatatataaattaagttcccatgattgaatacaagttatgtaagaatctgttgattcagttaatgcaatgggtatttccttcaataaatcaatcaattgatagggagtgtctgtagaatatgatataagggtatcaatgtcattaccaagtgattcatcagtcattggataaagaatgaatgttaagatcgaagtaccaatcaccactaccgatatacaatttgatgcggaatcatgtaatttttcactatgaagatcttctatctattaatctactaagtttcattttatacaaagtgaatggaatggaatggagtgtttatatatagagtgtttatatagagtaaaactaaccgaataacttaagaccagattgctttaatgcagatatatcctcttgttcatcttcctctaccttatcattattatcactatcattatcattatcagaatcatccatattaaatttaacaccaaataaacctgcaaataattcatcaatttgatcatcattccatgaataatattttcttcttggtatatcgaattgtgcaattggttcttgaactgtatattttaatttccttccctttgttgccattctatcataatttttttgcattttatttttcgataacattaaaattgctgaattacttgcttgcttctgatcaagttttttattaatcatatcatttaataataatttataaaaatcatcatcatcgaaaatatatggattaatttgtaaacttttatcaatattacttaaacctgcagtttgttcttcatctaagtcttcatctgagtcctcatcatcattcctttctttttcatcttcttcattatatccaattggagttgcatttcgacgattaattttagtctttttaacaaatctttctaaatcagataattgattattaacttgagaccaaacagattgattaataacagaaaatttaccttgatttaatgcaccaatacctgaagctgattgaactctatttgaccatttattaagaacagatttagttattggtaccattatatcatcaatttttttattagtttcaagataatctgataattttctcttctttgaagatgataaattaatatcaattttatttttagttaaactatccttttgtaattgatttgcctcttatattagttaatctttcaattaatgtaaataatttatcttcgaattgtatttaatattttatcagatgattcagttttaactgattgatatgaattataattaattggtaaattatttgatgaaacaattgctttctgtaatttaattcttgaatctaaaattctatcatattgagcactttgtttaagaattgtataacctttaattgcatcagacttggcggatgttgaaagtctactgataatttgttgtttttcactttcaagtaatttttcaattctttctctcttatatgtatcttcatcagattgatagttagtttcatcatcaaatccttgaaattcttcttcctcaatgtcttcatcttcagattgttcatcattcttcttctgactcttcattctcttcctcaacattttcatcatcttcactatcttcaatatctataccttcatcactttcattatcatcactatcatcattatcatcattattattctcaaatacttcatttctaccaactttagaaccagtatacttcccaccaagtacatctgatctaatactactcttaccaacagacacataatgatctcttttatgaatatccttttcttcctcttcatcatcatcactaccatcatcactaccattaatatccttcccactatttttatctacaaaatccgcattttcaatatcataatctgcaactttaggacgattcaatttgtccataagtttctcacccaacatcttaccagatcccctagccatgtctgtctttactctacagaaaagaagcagttactaccttaagacagtaaaataaaataaaaaaattttgaaaaaaaaaattaaatttttcactttgattacataatactattattactattatatcttcatattatcaagtttatctacaagagaagagtctttccttaagtttctgttcttgacacgactgttatccttagtaactgacattgcagcaactctatatctttccatctcttcattcttcttaacaactcttttcccacgtttctccaattgataattatcaaggaaatcatcaactaaatccataaaatcatctctctccttacttaaatcaaatggttgataatcatcttcttcactttcattattattatcatattgttcccttaaaacatcaaatttatcatctataattgtcatttgttcagttctacataatgcagatgatgacatagaatatgatgatgtatctgttgttgcacctttctttctctttgctttcttctttgatgctttaggtattggatgattttaatttcttaccttgaatatcaggtaattctcccaaacgtatcttcatcttcatcatcttcctcatcttcatcttcatcactatcactatcaaattcgttatcactatcgaattcatcaactttacgttgtttcttatatttagcaaaatctttctcccaattggtctctcctccttcctctatatccccaccaccttcataatcatcataatcatcataatcccaatcaccatcatcataagcattatcatcatattcatttaatgatatttcattttgcttcttaccatttaagtaattcatcgaaaacatcaatatcatcaatatcttgttcatcatctaaataattttcatcctctaatgcaattaatgcttctcttaaatcaggatttaaatcaggtttaaatccactaatttcatcaggtatatcttgttgtgtttgataattatatgatttaatttcttctgatggtaacatatcatcaccaaataatttacttaatgattttttttgattttccttttgcttttcagctgcttctttctttgatatgaaaataccacctgatgtaccaatatcttttaaatgttgcatataatcatattctgaatcatcgaataaaacaccataacttgcagctttaccttcattcttattctttaattcattttctaatgtatttaaatcaacattttcttctctttgaaattttttagaggttttcttattattactattattactatttttctgttgaataggaactaaaacagatttagatgcagtatcatcataatatcttgaatcctgtaatgatctatgaaccacttgaaacttaacagagttattcttatcgaatttcttcattgttcttgtccaaaaaagaaagaaatgtaatagttaaagtacttatttagaaaaaaaaatattttttttctctcactataatggtataatggtatagtatagctatatatatcctcttttctctctttgatcgtacactatggcagttataacagtgcaatcaatatcaccagtgtatacatgggaatggaattgtaatgataatgatgaaatgtgtggaatttgtcgtatttcattcaatggtccatgtcctcaatgtaaattccccggtgataattgtccaataactaagggtaattgtggtcattcatttcataatcattgtgttaataaatggcttgatcaacaaggttcaaaaggtttatgtccaatgtgtagacaattgtttaccaagtagtttatgtcttatatgtgtaatcctttcctatataatgtaatcaatgttgagttttacgcgggtgtagtgtagatacccatactttactatgactaatcttctttcagtagataatgagtacgatagttgttaagttaggttcatcatctattgttgatgatgtaactagagaaccaagagttgcaaatataactaaaattgtagaagaattagttaaattacgtagaaatggtaataaaattgtccttgtttcaagtggttcaattgcaatgggattaaatgaaactaatttaacaaataaaccaaagagacttgcagcaaagcaagcattagcagctttaggtcaaggtaaattaatttcattatgggataatttatttaaatattataatcaacaaactgcacaaattttattaactagaaatgatatagttgattttagtcaatttaaaaatgcagagaatacaattcaagaattattaaatatgaatataattccaattgttaatgaaaatgatacaatttcaactcaagaaattaaatttggtgataatgatactttaagtgcaataactgcaggtatgtgtaatgcagattatcttttcttattaactgatgttaattgtttatatactgataatccaagaattaatccataaagtgaaaaaattttattagttaatgatttaactaaattaaatgttaatactaaatcaggtgcaggttcaagtattggtacaggtggtatggaaactaaattaattgcagctgatttagcaactaattcaggtattacaacaattatttgtaattcaaattatcctgaaaatattaataaaattgttaattataaaccaatttatgataattctaaatcattaagtgaaaataataaaattgaagaacaaaatttattacatgaaaatattccattacatacaagatttttaggtcaaccaattaatcatgttaaagatcgacaattttggttattacatggtttaaaacctaaaggtagtgtaattgttgattatggatgtttccaagcaattacaaggaaaaatagaggtggtttattacctgttggtataataggcaattgaaggtaattttaatcaattagaatgtattgaattaaaattaggtaaaaagaataaagatggtagtattgattcaattacatttggtcgtggtagatgtaattataattctaatgaaattgataaaattaaaggattacaatcaaatttaattgaaaatgttttagaatattgtgatagtgaatatgttattcatcgtgaaaatatggcattcccaactcattgggatgataatttaattaattttataaaagaaataggtaattaactaaattttaacattttttatagacattttttagaaaattctcttgtatatttagttgcctgtgataatgtaattgattttgattccaagtaataatttaattattgaaattgaatcattatatgcaattttcttacattcattaattaattctggatttgaaatatttggtaatgatgtatcaatatctattggtttcggtattgatggtggtgatggtatattgggtaattcacatttattaaattgtttctttttaataattagcattgaatttaatgtatcatttaatgattcctgtacatcatttattaatggattaagcggtaatggtggtggagaggttttcgtttctgatattacttccttctccttcttcggcacttcaggtattggtggaggtaaagtacttaaaattaattgtattaatctattattttgaggatttgaataatcagtttcactatatgaccaattaggtaatataccattaattaaaggtggattaaatggataatttaatgggaatgtaagagttaagttaagtgaattgataaggatagttaatggattatcagatattgtttcatattgtactaattgatttaaaagtgctaaatcttcctctaatggagtcattatcaaagaaaaggtgttggttaaagggtgataattattatcagaacatgaaaaaaaagttggttgcataatataaatttattgtgcttattctttatctttatctttatgtctttctttttctttttacaaacaaagatacaatgtcaggatatacggtattaggtgttatgattgtaactattataattggttcaatattttggaaatttgcaccaaagcaagatcaaacagtttggagaagtacagtttcactttcattagcaatgatgtttttaatgtgggcatttacatatctttgtcaattacatccattagttgcaccacgtcgaagtgatatgcgtcctgaatagggtatttacacttatataataattgtatatgtaagacagtattaaataataacttagtaaatattaaataataatgagatcttacataatgatcataattactgcactaatcgaagtatcaagtcgataaaacactaattacgcttaatatactccactaacaagactttattctctataaggcagagataaaggcagaaacgggagcaccataaggaagaatgtacataagtatatagatatacactatactagtgggaaatacattctttttatactactcgagggctcattatattaatttttaagggtttctcttatactttattattacaatctctttcttatgattggttatatcttttattaatgtcactgttattaccaccgtatgtaccattactgcctcaattatcaattaatatttcatgggatttcttagacttcaattgttataatttatcacggtataattattgctttatgtattggtggtattgttggtagtgttaatatattgatctattgtactatcaaagggatcattaatatgattgttagtttgttcagtacacccataccaataccactactatcactaaacctactatacatattacaccacctacaccatctactactactacacatacaataccagcagtagatgatactttaatagaaatagaggaagacggcacagacgcgacgacggtgacgaagtactgaaaaaaaaaattttttgctttttcatgctttgagaagaggaaaattttttatttttcattggtaggtggtattatcatatatagataggacttcctttaacaacgattcaaacaatatgcaaattgcaccatctaatgaatctccaactaatgatgctaaagattggccattattattgaagaattatgatgatttacttattagatcatctcattatactccaattccttcaggttgtacacctttaaaaagatcaattgatcaatatattaaatcaggtattattaatttagataaaccttcaaatccttcatctcatgaagttgtcgcttggattaaaagaattttaagagttgaaaaaactggtcattcaggtactttagatccaaaagttacaggttgtcttattgtttgtattgatagagcaactagattagttaaatctcaacaaggtgcaggtaaagaatatgtttgtattgttagattacatagtgcattagatgatgaaaaggatatgttaagaagtttagaaaatttaacaggtgcattatttcaaagacctccattaatttcagctgttaaaagacaattaagagttagaacaatttatgattcaaaattatttgaatttgataataaaagaggtttaggtgtattttgggcaagttgtgaagcaggtacttatatgagaactttatgtgttcatttaggtatgttattatcagttggtggtcatatgcaagaattaagaagagttagatcaggttgtttaagtgaaaatgataatttagttacattacatgatgttttagatgctcaatatgtttatgataattcaagggatgaatcatatttaagaaaaattattatgccattagaaactttattagttggttataaaagaattgttgttaaagatagtgcaattaatgcaatttgttatggtgcaaagatgatgattccaggtttattaagatatgagaaaggtattgaattatatgatgaagttgtacttatgtcaacaaagggtgaagcaattgcaattggtattgcacaaatgtcatcagttgatttatcatcatgtgatcatggaattgttgcaactgttaaaagatgtattatggaaagagatacatatccaagaagatgggggttaggaccaattgcattaaagaagaaacaattaaaaaatgatggtaaattagataaatttggtagaattaatgaaaatacacctgaaaattggaaaaaagattatatttcacatgaagatgtacctgcaccaaaagttcctgaagataaattaaaggcacctgaagttcaaaagagtaaaagttcattatttgataaaaaggatgatgatgaagtaaaggaagataagaaagataccgaagaaaagaaggaaaagaaggataaaaaggaaaagaaagaaaagaaagataagaaagataagaaggataagaagagaaagtctgaagaggaagatggtgaaaagaagaagaagaagaagaagtctaagtctgaataagtaatataagtttaataacttttgtattttctcctaaataagtaacataaaataaaataaataatatttcatgcgccatttcattattattaatattattaatattattaatactgcgccacatggtaatattttagatgttaaattaataatatactctctaaacccttcctctttcttttaaccattacacaaacagtatgtcctgggatggatttaagaaagcattgaatagaactactggtgccgtattagttaaggcagcagataaagttactgataaagaatatgatattgaagagagaagatatagagttttagagaaagcaggagaagcattacaaaaagagactaaaggatatcttgattcattaagagcagttacagcatcacaagttgcaatgggtgaaacaattaataatttatatgaagatgcaagaaatttaggtggtgttaatattggtggaatgtatttacaagcagttacagaatatgatactgaaactgttaaacaattagatggaccatttagggaaacaattttagatccaattactaaatttagttcatattttaaggaaattaatgaagcaattaagaaaagatcacataaaaagcaagattatgaacaatgtaaatctaaagtacgtagattaattgataaacccgctaaagatgcaagtaaattaccaagagctgaaagagaattagcaatggcaaaggatatttatgatgatttaaataatcaattaaagagtgaattaccaatgttaattgatttaagagtaccatattttgatccatcatttgaatcattagttaaaattcaattaagattttgtactgaaggatatgctagacttgcacaagttcaacaatatcttgaaccatcaacaagagatgaatacgcaaatggacagttagatgttagaattgaccagatgttagaagagatgagaagactcaatatctgttccctaggtattaaataggtatagtaatatgattatgtaatataatagtaatataatagtaaaatattcgagaaggttcctgaagaaaaatggtgctcttcctcagttatccggtagctatttatttatatttatttgaatgtttccatggtacactactttctcttctttgattcttattgtagacaatagacaatagacaatggttagagaaactaaattgtatgatttattaggtgttcaacctactgctaatgatgcagaaattaagaaagcttataggaaaatggcattaaaatatcatcctgataaaccaactggtgatacagaaaaatttaaagaagttagtgaagcttttgaaattttaagtgataaagataaaagagaagtttatgatcaatatggtttagaagctgcaagaggtaatgctccagctggtggtatgggtggtggtggattcccaggtggtggtgcaggtggattttcaagtggtggattcccaggtggtggatttagcttttcttcatccggtggtggtggtggtcatccattctctcaagatgatgcttataatatttttaataaatttggtggatttgattttggtggtagtggaatgggtggaatgggtggtatgggtggtatgccaggtatgggtggaatgggtggtatgggaggtatgggaggtggacaatcatcaagaagaagagaacctgaaacaattgatcttaatgtgccctgctctctggaagaattatataaaggtggagttaaaaaattgaaaattaatagaaaaggaccaaatggtgataatgaaagtaaaataatagaaattaatattaaaccaggttggaaatcaggtacaaagataacttttaataatgaaggtgattataaagatggtgtacgtcaacatttaagattaattttaaatgaaaaagttaataatatttttaaaagagaggataatgatttaagatctaaaattgatttatctttcaaagaatcattattaggtttccatagagaatttacaactttatcaggtcgtaaattacatttatcaagaagtaatccaactcaaccaggattttgtgaaaaattccctggtcaaggtatgccaatttctaaacaacctggtaaatttggtgatttaataattgaatataaagttgattatcctgttaccttaacacaagctcaaaaggatgcaattcaatctaatttctaatttgtatagtatatcctaaagtatattattaaagttatataagtaaaagttatgaacaatttacgtaatcatataatgataaatcgactttacactgtattgttattcatgagtcctcttatatacctccattcttttgacaatgtctgttatattagtatctgcaggttatgatcatacaatacggttttgggaagcacttacaggtgtttgttcaagaactattcaacatagtgaatcacaagtaaatagattagcaattacatcagataaaaaatatttagctgcagctggtaatcctaaaattaatttatatgatataaggtcaacaaatccaagtgcagttcatacatttgaaggtcataaaggtaatgttacatcattagcatttcaattagataatcgatggatgtgttcatcaagtgaggatggatcaattaaagtttgggatattagaagtccatcaattcaaagaaattataaacataattcaccagttaatgaagttgtaattcatcctaaccagggtgaattaatttcatgtgatcaaaatggtactgttaaagtatgggatttaggtgaaaataaatgtacttatgaattaataccagaggaagatatttcaattcaatcattatcatgtgcaagtgatggttcaatgataattgcaggtaataataaaggtaattgttatgtttgggaaatggaaaattcaactgatagaacattattaaaaccaatgaataaatttaaagctcatagtaaatatattacaaaaattttattatcaagtgattgtaaacatgttgcaacatgttcagctgatcatacaactagaatttggtcaacaaatgatttctcattagagacaacattaagaggtcatcaacgttgggtttgggattgtgcattttctgctgatagtgcatatcttgtaactgcatgttctgatcattatgtccgtttatgggatttatcaactaatgaaactgttagacagtataatggtcataataaaggtgtcgtttgtgtagctctgaatgatgtataagatgtatataagatagattcggtatagtttcctaattgggtaatttaactttattttgcatgaaaagtttgtcttttagtaggatatctctcttcttttggcaatgaatagacttagacattacaggaattatcataagagtacatccaaactactgagtgataaagaaaatctagaatttcaatcaactaaatcactcttacctaatataaaaccagtttctaaagttgatgcattatggtatatacgacataaaggttatcctgaaattaaaggtaaatttaatcaaaattatttagataatgtactttcatcagctattaatgatgaaaaatgtttgtataaattgaaaagaataacttctaaattatccaatccaccaactcataaattacgtcgtataacgggtacatctaattggctttatgttattaaaactccatggaatagagatttacgtacagaaaattttaaaatgttaggtgatttaaggaaaagatatgatgaaataatggtacaattacaacaatgtaatagtgaaaatgataaaaatagatacgatactaatgatgatgattcaaaatggttagttgaaactgcacaaaatcaattaaagagtgaaaagaataaaattgaacaacaagtaatacaattttgtaaaagacaaggtgttatatatgacaaaattaaacctgaatttgataaattacatattcaagcaaaggataatatatctttattacataaagaattatctaatgaaactacaagtcctggaacttatactgatgtaattgatggtggaattaaaggtttattaactaaatatggatttagaagttaattatgtttattattattccaaaactcttatatcattttcaatactaccattcactaaaccattgtttatctaattctattcgcataaataatgcatcttcacttaattgtcttctataaaattctgattttaaataatgatctttacaacaatatctagttgaataataactttttaatgcaaatttttcagctattttattaaatttaacttcatcccttatcttgtcatcttgtatattacaaattggatatccacaccaatgtccaattatcctttcctctattatattttcatatgcacttttggataaatatcttgataataatttaagtaattcaacagtacaattatctttcattaataattcaattattgaatatgttaatccatttgcttcctttggtgtaagtaatggtttctcgaatccttgtattagtttcttaaagtcttctattcctattgtcatgttgtatatatatatatgtgtgtgtaatgtacagatataaaaaaaagagaaagaagaaaaaccgatataaagtttaaaaaagtttcatgttagtgatctacacgatatatcttatttcttttacaagcatatcgtatacttatttgcaccatgggacataagaaaaaactgcatatagatgtatcattgaatattacaacaactaaacgtacaagtctttggaaactgttacttcatgaattcaatatttccaataatacaaatcaaagatcaaatgattcaataaataatgataataatattcaattattgtttaattatgttaaattaccaatacatttagagaaatttatgatatttggattgatttatacattagttgtatttcttaaactgttagttattataccatttcgatggattattcatacattaatattaattatttcaacatttacaaataaaagtaaaaggattaaattaccaaaatttaattcaataagttataaaaatgattcaattgcagtatctaatattataattacattattgttattgaagaatattgatacaagtagaatttatcataatattagatcaggtactgcaattaaattatattttatgacacaagtattagaaattgctgatagattattaagtgcaagtggaattgatattttaaaatcattatttagaattaatataaggaaaagaaaaattaatttcatattcatttatggattatcaataatttatctttatattccattcatatgttttagtttatcaagtaatggcattaaatgttgcaattaattcatattctaatgcattattaacattaattttatcaaatcaattctctgaattgaaaagtgcagttttcaagagaactgaaagagaaggattatttcaaatttcatcatcagatttaaatgaaagatttttattacttataatgttaataattatttcatcaagaaatttattacaaattttaattaatacatcatcaattaatgattttttcaataatattaaaccaaattcttggttaactaatataactccttggataatggttgataattggcttggattattaattggtccttcaattttggttattggatcagaattattagttgattggattaaacattcttatattataagatttaatagaattaaaccttcaatttatgataaatatacaaaaattttatcaaatgattttattaatggattaaatggtagttcaaatcaaattaatgattatccaagtttattgactaaacgtacaggattcccaattacaacattattaatagttttctgtaaattatcagttttcccatatattaaacattttacaacaaatttattgaataattattcaacaattatatcatctattctcatattattattaattattgtattgattacattattaatatttattagattattattatcaattatattacttaattggtctaaagaaatattatcaaaaccaattttgaaaaatgattatacacttggtgaaccaaatgttaatacgagtaatatttcagatgttaggaaatctttatataatagtgaaattgaaacaattccacctactgtagaggaaaagagattgaagaagttatcagatagaaaagttgatgctgatgattcattgtctaatgttgtaaggtttgaaatggcagacaagagaatatggtgattatgtaagtactttctattctttataataccttttatactttatactttactccttaacaacataaataccatcattagggataagtacaatgtctaaagtaacagcggaatcattccaaacaaaggactctgtatttatgtcagggaatttctctgcaaaacatattaaaccaacaattaatgagacaattccagaaattaaagcaacaggtgattcaacttcaacaaaaccatcaactgttacaattacaggtggatttaaaactataaatactcaagataataatgaatttaataatcaattaggtgtaagtattaatagaactccacatcgtgaaagtttacttagtgcatcaattacatcaaaaggaactgaatttagtattaagaaatcaatttcaaatactgaacaagcatcaattcatcgtgcaagatcaatgaatttacctaatgatatagttacagaggaacgtagagaatttacaccaatagagaatgatatgcctaatgtaattgatacagatgaatcaataatgtttcgtcaaccacaaccacataatagatttttaaagaataaatcatttaatagaaatattaaaacatttacaggaatgtattggaaatttgcctggtgaagatcttgaagatggagaggaagaagaggaagatgatgaagatgaaagtgaaatggaagatgaagagaatattagttcatcatctggtaagaaaacaactacattaaaggcatttttacttttattaaaggcattcttaggtactggtattatattcctacctaaggcattctctaatggtggattgttgttttctaatttaatgattatttcattttcattaatttcatatttttgttttattatattaattaagacaacatctaaatgtaatgtttcaggatatggtgatgttggatttaaattatatggtggaatatttcaatttattatattattatcattagcattatcacaattaggatttgcatcaacatatattgtatttgttagtaaaaattttaaacaaataatagatagattattaggtgatgaatattcaattggttgttttattataattcaatttttaatatttgtaccaatttcatttacaaggaatatatcaaaattaggtgcatgtgcattaattgcagatatatttatttttttagggattaatttatatttatttccaatcatcacataaattaatagttgatggaattgcagataatttaattatgtttaattcaaataattggacattatttattggtacagcagttttcacatatgaaggtattggattattaataccaattcaagaaagtatgaaatatcctgaaaattttaataaattattatttattgtaatgataattgttacaattgttttcacatcaattgcaagtatatcatatttaagttttggtaataatgttcatacaattatattaatgaatttcccaatgaatgaaatgacaattataattcaaattttatattcaatggcaattttattatcaacaccaattcaaattttcccaacaattaaaattattgaaagttatcttttcaataaggaaaggaaaacatggaaggataaaattagaagaaattcagaggcaatttctatattaagtaataatacatcaagtgcattatcaacatatagtagtataatgggtagtccaaatatgaatttagttaataatgaaggattagtttcaggtaaatcagataattcaataaagttaatgaaaaatattttaagaataatagttatttcaataatgtcattaatttcatatttaggatcagaaaatttagataaatttgtttcattaattggttcattaacttgtgtaccattaatttacatttatccaccattattatattacaaacaatttcatagtgaaatgagaacaatagagaaatgttttacattaatagttttaatttcaggatgtgttgttatgtcatatactagttatcaaactatttctacatggtagttagatactataccctatattttctgtatataaccttactttgtcataatgataataataataataataataataataagactttaagtgaaaaattaaaaaaaaattttcttttctacgatcttctttacccgattaggaaggtcaatgacagattatatttaattagagagtgaagaatttgcaattttaatgggttgttatacactcttttctcttaagttatgggtcaagtacgtgctgttacacctcctaatgttctgttaacagagaaaaatgttgcagaacgtcctaaaacttcaacaatgtttaaaattaatagatttttcagttcaagcaatagcagttcgataaattgtaataataataataatagtggtaacaataatgtgattatgaaaaactccggtggtgaatcaagatcttttagtgggaatagtatgactaagaagagtgttcatagtggtggtagtagtagtagtaatgatggtgatcatgaaaaggaaggatggaaggataaagagaaggaaaagaaattacataatggagatatttcacgtggatcatcaatacgaacaaagaatagtagtattaataataataataataataataataataataataatacatatgcaagatttaaaatcttatcagatggtaaacatacacataatttacgtacagttaaaagacaagaaaaattaggtaagatggttaaagattggattagtggagcaaatcataatcgacattcagatgcagttagtgcaatacctaatatatttgccaatgatttaaatgatggtaataataataataataaaagtaaattaccaccaagtttattttcaacatatttaagggaacaacatataggaggagaaggtggagattcaagttcattattatcaacacagccgaaatttaaggataatgaacgtaatgaatcatttattgaaaaatatggtaaatgtaatgaaattattggtaagggtacatttggaattgttagaattgcacataagaaagtaaataatacagatgtaatgtatgcagttaaagaatttactaaaagggataatgaaccagagagtaaatatagtaaaagattaacatatgaattttgcatatcatcatcattaaaacattgtaatataattaatgcatttgatttatttaaagatttaaagggagaatattgtgaagtaatggaatattgttcaggtggtgatctttattcattaattgtatcagctggtaaattagaatatattgaagccgattgttttttcaaacaaattatgagagcagttcattatatgcataatatgggagttgcacatagagatttaaaacctgagaatatattacttacaaatgatggtacaattaagataacagattttggtagtgcagaatgttttaaaactgcatgggataatgaaattgaattaagtaataaaattaaaggatcatcagcatatattgcacctgaacaatttattaataatgaatttgatccaagatttgttgatgtttggtcatgtggagttatttatatggcaatgcgtacaggtagacaattatggaaggaagctcgtaaagaagatgaattttttttacaatatttaagacgtaggaaatgtgagaaagggtatgaaccaattgaacaattaaagagagctagatgtaggaatgtgatatattccatacttgatccagtacctgagagacgtataactacattgcaggtactgaacagtgaatgggttagagagatttactgttgtaagagtgtataatataatattacgtaatgcatattgaaggacgatgcgacgattttaattttttaatttgccctgttttcaaatcccgatttgccagatctgagcatttaactttttgctgagcatctgatgttataacatgtagatgtaagtactttcttattggaatagatatttataatggtctctgatagtatagatgggtcattacgaataggtattgataatcgaaatacttcaattaataggaaattgtttaaaatgaatactttttcaaatcatcttttgaataaattacttttaaggcccatttattcaattttattaccttgtatattacttttattcataagttatccttcattatacaatttctacttatctcctcattcattcattaattcattgaattttaatagttctaataatttaaaatctataagatttactaaattaaataatgatttaagtcataatttaaatcatttatcaattcaatccttttctatatattcagatgataatttattaacaaaagattctctaatacagtttcatgatattcaacagatgttatttgaaaatatattggaaaatcaactgagaatttattccccgttagattattggaataatgataaaaatttaattcttaatgatgataatattttgaaaacaattcaattaaatggttggaatttgaaaaattctattataaatcctttaagtaatgtgaaattattctcaggtgttgaaaaattagatggtttaattaaaagtgcaaatattttaagaattataactttatttaatgataataatgataataatattattaatatactaaatgaaaatgtattgaaaattaataactccttcaataattcattcaaaatccaatcattatcatcatcattatcatcatttgattattacaaaattgatactaaatcttataacattattgaattcatattaatttccattatattacccatattattcattcaattaattattaagattagaaaattaaaactgattaaatcaaaattatgtattttctcaggttttatccttcaattaactttaacattctttgcaagtttatcattaacttcaatttgggatcttaatttagaattcttacaaataccctttttattgataatttcaggtcctttattaattagtatagaaaatatttcaagattaataattacaactcaatcttattcaaatgaaatctcatttactgaaagagttcaaaaagttgttaataattcattcccaatatcttcaagttataacgcttttagtatattaatattattaatctctttatttatgtcaagaacaagttcatcattttatttttgtttatttacaatcttcaatataatcttaaattattgtttaacttatacttatttctttacaattctaattgtggatttaaataaagttgaattacaagatttaattcaaatttcagataaaaaaaatttttcattaccagaaaataatgattataatcaaattgatgaatttaaaattattattaataaagagaaatcaattttaaaatatttatcattaagtaatattttacttaatttaattttattcctgataattattacgatatcacttaaatgggcagatggaattttatgttcaaatccaaatattaatttggatttatttttgaataaacgtgggtttgttcatgaattattacaattatcatcaatcaaagaaaattctttaataattaaattatttgatccattcattttcagtcaaggtaattcaattattaatgaaaatatcctttatggaaatacaattaaatattcatttgatttatattatattttagaaagtttgtttttcatattatttacaagttcaattttaatgttaattttagttttaaaaattaataaatcatcaaatattacaaaaaattcatcaattaataattcaacaacttctaataaatcatcccaaaatccattaataccaacatttgaatcaaaggaattagtcaatggtcatgtattagatattgttaaattatcaacatcatcatgtccatttattgtatctgttggtattgatcataaaattttagtttggtcaccaatgaaaaacccaatcccgaaaccaactcaattaccaattaatgaaaatttcttaccaattacaaatgttgtaatgtcagattctggctcatttattgcagtttatagtaaatttggtgaaattaaatgttggtcaagattatcaatgtcatgggtttgggacgttcaaattgatgaattaaataatgatataccattagaatcttttttcagaaggagaactcatgttagtaatggtagaagaaaattagttagtagatcatctaaattatctaaaactgttaaagaagaaagtaaaagtgaagatactaatactgttattaaaccaaaattaaaatcaagattaaaaccagttgatgaaaataatttaagaccaagtagatcattatcattagattctaattttatggatagtgttaatttaaagaaattaacatataatagtgatatggaatttataattgttttaaaaaatggtacaattatttcaattgattgtacaaatggtgaaatgaataaaacaattttaagtaatagtacattaatttgtgccaaaaaattattatcaccaagagttaatgatagaattgtttgtattaaagaatctggtggattagtcgtttcaactgctgttaataataaatggaaaagtagaccagttaaaattgatgttaataattataatatgggtaaaagtttaattacaccagcagatttatctaaatataattattcaacaccatcatcaccaacaatttcaccaactaatgcatcaattgcaattaatagtttagatttaaataacagtatcaacaatgtgactaaaaaagtttattttgatgaagattcaatgtctgattttaaaggattagttatggaaactgtaccgtttgttggtatgattgttagagcatttggaattaaatgtcaattaattgatgttcaaacaggaattgttttaaaagaatgggaaattgttaaatttaagaataatagttttaaagtattccatcctgaaccatcacattgtagattttgtggatgtgcatcagtttcatcatttagtgttgcatatacagaatttgatacaaattatttaattttacatacattttcaattgataatagagctaaaaataatatttgtttaagagttgaaagagattcaagagagacaagatgtcttggatttgcaagtgttacagaacatagacatttattaagtgatgttgaaaattggtgttcaaatgatttaaatattttaatgggtattagaaggaaacaaaataatgatgatgaatcaattataacaagtgatgaaattattaataatgataaaaatgataaaaatgaaattaataaaggtacaaatactgcattaaatagaatatttgaatctaatcaaattggtttaaggaaaaagacataataaaataaatcaattaaatgaactttctaagtaatattttatcaaagattgatattaataataaaattaacaatactacagaggattttgtaattactgatgaaaaattattaaataatgataatgataagatgaataaagtacataaaataagtgatatttggggaggttggacaatgtcagcagatggtaaagttaaatattttgaaatacctgatggaacagattctggtttattaattaagaaaattggaccatgtctgtaaatttggacataaatcaatgattgttagttttggtaatataatgaaagttttatatttaggtaatgataatttaattgaggaaggtgataatgaagaaaatgaaactaatagaactcagttcatcttcaaatgcatcaatatcatcattaaaaaatagaccatcatcctcaatatcatcatcctcatcatcatcatctaataagttattaaataattcatcagtttatcaatcatcaaatagtttaagttttattgatcatagaaggaaattaaggatgaaaaactatgatcttacacattctactaatttcagtgatcttaaagttatagaagatgatgagtaatttgtatagtttacaacagtttacagtttataataaaacacaacacaatacagtacaataaagtaaatattaatgattcataacgtacaaatataagataagagtcatatcgtaataatagcgcttaattgaaaatgttagtggaaatttaaaaagacgttgttttccatgatagtttgaagtttaaatattctttatctgaaggattactactctaggacaacaatgacatttgatataactaagattgcaagaccaaatattttaactcttgaaccatatagatgtgcaagagatgatttcactgaaggtattttattagatgccaatgagaatactcatggaccatcatttataggtatgacagagagtgaaaataaattagaattaaatagatatcctgatccacatcaacaagtattaaagaaacaaatttgtgaatttagaaataatgaaagaattggtgaagataaaattgatattaataatttatgtttaggtgttggatcagatgaaagtattgatgcattaatgagatgttttatttcacctggtaaggaaaaaatgttaatttgtccaccaacttatggtatgtattcaatttgtggtgttgttaatgatgctgaaattgttaaagtaccattagatttagaaacttttgatataattccagaaaatattttaaataaattaattaatgatccattaattaaattagtttatattacatcaccaggtaatccaactgcaaagaaaattagtgaaagtaaagttttcaaattattagaagaaattgaaaaaaattcacttaatgttataattgtactcgatgaagcatatattgatttttcaccaattggttcatcattatgtacattagttaacaaatatccaaatttagttgttttacaaacattaagtaaagcatttgcattagctggtattagattaggtattacatattctaattatcaaatttctaaattattaaattcaatgaaatatccatataatattagtaatttaacaagtgatattgcaattagatcaacaactgctgaaagtttaaaagaaacaaaaaataaaattaataaaattattgaacaaagaggttttgttttagataaattacttaaattaaaatatgttggcaagaataagggtggattagatgcaaattttatacttgttgaaattttaaataaagatttaaaacctgataatgaaattgcaaataaattatatttaacattagcaaaggaaaataaaattgttgttagatttagaggtaatgaacttggatgtaatggttgtcttagaatttcaattggtacttctgaagagaatgaagttttagtttcaacatttgaaaaagttttaaatgatattaataatcaattagaattatgatttgtaatcatttattttcatttctaatttgtaatcaatcatagactttataataataatcctagatagtaaaaagatataatttccataaaatagatgtaataactggatacacatcctctaacaaagggcggttgtcatgacaacaactctttatttccgtttttttcacccttcttagaaactccgacagcttgtccgatttttaacttcttgctaccaatttgtataaatactaaggggaaccatcatcatatatttggtgttgtaattaatatttatgagcatcatcaaacaaacaaacaaacaaacaaacaaattataatgagagcagtaatttttggatcaacaggtaatgtttcaaaaccacttgcagctaagttagctaaggatggtgttgaaactgttcttattacacgttctgcaaataaagcagatgaaattaaggcttttggtgcaattccagcaattggtgatattaatgataaagagtttttattaaacacattaaagggtgcagattctgtatttgttttaagtgcaataccattcactatgtcaaatattgtcaaagaatcaaataaacaaatggaatatattgctgaactattatttacaatccaaggttcctaatgttgtttatttaagttcaattggtgcacatagaccaggtattggtggattagaatttcattattataatgaacaaattttgaaaaataaattaaatggagttttaaatagtttaacttttgttagacctgcaaaattttattcaaatcttattagttaatcttaacgatgctaaaaagggtactgtttattcatttttagatacttgagaaagttcattcatatgtttcattagatgatatggctgatattattagtgatattatggaacatccaccaactgataaattaaaagttattaatattgaaagtgaaagaattacaattcctcaaattcgtgatttatttgctaaagtattcaacaaccctgaacttaaatgggaatattctccagttgaaaatactgttaatgcaatggttcaattgggattaaagagggattcagttgatgctatttttgaatcattagcaccaccatcacatgatgaatttcatgaagacttctttcatggtaaaactgaaattgttaagggtaatcgtacagttgaagattatattaagaatgagttaaagccaatctatgatgctatctgatataaaaaatagtaaatccggctatcattacggagaccgctttccgactatgtatattcctaggattaaacgtataatttatatagataatatactccggcaaacggagttataaaaataatcactataaacggtaagagacgtattaaaacaattgaagtttaattgtataacaattgtgttaataaagattttaagttaattagcgtaaactttattacaaactcgttgaatcgttttgctacctggttatctatacaaattttgacaatttaacaatatagggctttccgacatcgattgcaacgtagtagtgtagtattaatgccattagtatattgtaattggtatttaaacactataattatacccaaaaacactaagcaatcaagatatagataattctaaaaacaatagaaaacgataaaaagtctaaattacattgaaaaaatggtctcactgtgaggctggttaattcaaattattgctatctttgctattatttccatcaatacatgctctgtggtaaagatactcttgtacatgctttgaattatctgagataactcagtgtatataatataactcactgaatattctatatcagttaaatcagtgcaataatataaggaataaagtaggtggtggaagtaagtaattccgtaggttaaaagagcaaaaataaatttaaagtgagtattttttaattttttttaattttttaattttggaaaaacggttttttgacatgtcttagcaatcatgttttctaattgtttacatcggttttaattcatattttattgtctacaagtgtctttaattatacaattatcagtaccattaccatttccagtataattaccagtatgattagcatctctattgtaaataatcaagaatcatgagatgaatctatcatttaccattattcccgttgattttcaacttaacataattttgaggagattatataaatatatcgatggttaattccaatttaaattatcaatgtattaccttatttaggaatgtctattccactctatttataaaagtttaatgcaaattatttcgttataaactaagcaaaaacttactcaatgaaatacaatatattggtatcattagtatactttttactttattcaaatcttactcttgcttatgttataccatcttgtactgatacagttacagttgttgcttatcattctgttgagttaccacttggtacaaatgcaggactatcaagtaggagaaccagatctgcaagaccatcatcaagttcaagtttaacatcaagtacaagtttaatttcaagttcaagttcaagttctgaaataattccacaaacttcatcaagttcattatcagacttaacatcaagtatttcatctactgaattattatcatcatcttctactgaattatcatcatcagaaattttttcaattactataccatcatcattcattacattgtcaagtgaatcttttaacaattctttaactacaagttcaagctctgaaataatttctgaaagttcaacttcaagttcaagttttgaaataattccagaaacttcatcaagttcaagttctttagatttatcatcaattacttcatccactttatcactcactataccattatcatcaagtgtttcatccactttatcaatcactataccattatcatcaagtgaagtatcaagtgaatcatcaagtgaatcttttaacaatttttcaacttcaagttcaagctcttctttagatgtatcatcaagtacttcacccactttatcaatcactataccaatatcatcaagtgaagtatcaagtgaatcttcaagtgaatcttctaaatcctatgcaaccactacattttcaagctcttctatgatatccttacaattttcttcatcaaatgatgcatattcatcagcatctataaatacatcttcatcatccagtgatgtatatttttcctcatctagcaacacatatccatcatcatccatgatttcacattctatgtctaaacgagaattatcatcaagtatcgctgattcatcatctgttgcatcatcatccactcttacatcaagtatgaagtcaagtattaaaccatcatccgctttcacaccaagtattgaaccatcatccacttttacactaagtattaaatcaagtactaaaccaatatccagtgtttatggatcatcatccactttcacaccaagtattaaaccaagtactaaaccattatcaagctctacatcaagcatggaaccaagcaccaaaccattatccagtgtttctcagtcgtcatctccttccaaaacaagcatggaaccaagtattagatcatcatccagttcagaatcatcatctgttacaccatcatccaattctacatcaagtatgaagtcaagtgttaaatcatcatccaattctacatcaagtatgaagtcaagtgttaaatcatcatccaattctacaccaagtatgaaaccaagtgttgaaccatcatctagcgtccttgaattatcatccgttgcaccatcattcactccagaaatctcatccaccactaaaccaaatactaaaccatcatatgttgcatcatcatccacgcttacaccaagtatgaatccaagtactagatcatcatccacttcctattcatcatctgcaaaaccaagtaccaaaacatcatctactccctattcgtcatctgctgcaccatcatctactcctaaaccaagcatgaaaccatcattcagtccagaatcgttatcacccactactacttcaagcatgaactcaagtgttaaatcatcattcagcgctccagaatcatcatatgttgtacaatcatccaaaccaagcacaaaatcaagtaccagatcatcatctagtgcttctgaatcatcattcacacccacatcaagtatgaaattaagtactaaaccgtcatccagtgttcttgaatcattatctgctgcaccatcatccacttctaaattaagtactaaatcatcattcactgctgaatcaagcatcaaaccatcatctattccagatatatcatatactcctaagccaagtactagaccatcatccatacttacgccaagtacaaattcaagtacaaaatcatcatctattattcctggatcatcatctgtcgcaccatcatccactccagaatcattatccactcttacaactagcacgaaaccaagtactagactatcatccactccagattcatcgttcacttctgaatcaagtactaaacaaccacgtacttcatactcatcatccatgaaaccaagtgttaaaccatcatccagtgcccatgaaccatcatttgttgcaccatcatctaaaacaagtacaagtaatggaccatcatccactcaagaatcatcatctattgcagcattatcaacttttaaaccaactaccaaaccatcatccaatcctacaccaagtatgaagtcaagtactgaactatcatcaagtgctccaaaatcatcatctgtggcaccatcatccaaacaaagtatgaaatcaagtactagaccatcatccactcttacactaagtactaaaccaagcactcaaccatcatctagtatcactgaatcatcatttacttatacaccaagtatgaagtcgagtattaaaccatcatctagttctttagaatcatcatctgcaaaatcttcaaccagatcatcatccactctagaatcatcatctgcaaaaccaagtactaaacctttatccaggtcaccatccagtccagatacatcatctacgtctacatcaagtgtgataccaagtactaaaccatcatccacatcggaaccatcattcaattccactccaagcatgaagtcaagtactaagtcgtcatctagtgtttctgaatcatcatctgttggatcatcatctaaacaaagtatgaaaccaagtactatgccatcatccgctccagaatcctcatccactcttaaatcaagtataaaattatcatctagttttcaagaattatcatctgcaaagccattatccagaccatcgtccactctagaaacatcatccacttctaaaccaagcactaatatgtcatctagtgcttcttattcatcatccgctgcatcatcatccaaacccagtatgaaatccagtactagaatatcatctagtgtccctgaatcatcatcaactttcacaccaagtatgaaaccaagtgctagaccatcatctagtgtttatgaatcatcattcattcctacatcaagtattaagttaagtactaaaccatcatccagtggctctgtatcatcatttgttgcaccatcatctattgctcctgaatcatcatcagcaaaaccatcattccgaccatcatccacttctaaaccaagtactaatatgtcatccaatgctccttattcatcatctgtttcaccatcatctactcctaaatcaagtatgaaaccatcatctactgctaaacaaagtactaaaccatcatcatccagtgttactgaatcatcatctacatcaacaccaagtataaagtcaagtattataccatcatccactcttactagaggaactaagtcaagtgttaaatcatcattaaatgctccacaatcatcattcactcatacaccaagtaataaaccatctttcagttcagaatcatcaccagcctctagtgtggcaccaagtaccagaccatcatctaatgtccctgaattatcaaccaatcctacattaagtataaagtcaagtaccaaatcatcattcactcctaccacaaatatgaagccatcatctagtgtttttaaatcatcattcacttctacaccaagtctggagtcaagtatgagaccatcattcagtttagaatcatcatctgttgcaccatcatccagtcatatatcaagtatgaaaccaagtactaaactttcatccagtacatattcatcatttactgcatcatcatcctctcttacatcaagcatgaagtcaagcagtagaccatcatccactccacaatcattatctgttgcaccattagctacttctaaaacaagcaacagatcatcatccagtgcttcagaattatcatctgcaaaaccaagtactgaaccatcatccagttcttattcatcatatgctgcaccatcgtctacttctaaatcaagtatgaaaccaccatcccgtccagaatcatcatcatcaactgctactgcaagcatgaactcaagtgttaaatcatcatttagcgctccagaatcatcatatgttgtacaatcatccaaaccaagcacaaaatcaagtaccagatcatcatctagtgcttctgaatcatcattcacctctctatcaagtatgaaattaagtaataaaccgtcatccagtgtacttcaatcaccacatgtcgcaccatcatccactcttacgccaagtatagagtcaagtacaaaattatcatctattattcctggatcatcatcaattgcatcatcttccactcttacatcaaacatgaagtcaagtactagaccatcatttagtgcctttgaatcatcatctgttgcacaatcacccaaactaagttcggaatcaagtgttagatcatcatccaatgtccctgaatcatcatttacacctacatcaagcatgaaatcaagtaccaaaccatcatccactttagagacatcatccactcttaagtttagtactaaaccatcatccagtgtttctaaatcatcatctgttggatcatcatctgaaccaagtatgaaatcaagtaatagaccatcattcagttcagaatcatcatctgttgcatcatcatctactcctactaaaccagcattcagttcaaaatcatcaccagcctctaaatcaagtgggacaccaattttgacaccaagtactagaccatcatctagtgttactgaattatcatccagtactaaatcaagtatgaagtcaagtgccaaatcatcatacactctagtatcatcatctagtgctacaccaagtatgaagtcaagtgcaccatcatccaattctaaatcaagtattaaattatcatctagtgcttcagaatcatcatctgcaaatttatcatccagaccatcatctagtgctccagaatcatcatctgcaaaaccatcatttagtgctccagaaacatcattcaattctacatcaaatatgaagtccagtactaaagcatcatccagaccatcatttagtgcttttgaatcatcatctgctgcatcatcatccaaaacaagtttggaatcaagtactagatcatcgtctaatgttcctgaaccatcatttacacctacatcaagtatgaaatcaagtaccaaatcttcatctagtgctccagaatcatcatctgcaaaaccatcatccagtgttcctgaattatcatttacttctacatcaagtatgaaatcaagtaccaaaccatcattcactccagagacatcatccactcttaaattcagtactaaaccatcatccagtgtttctaaatcatcatctgttggatcatcatctgaaccaagtactaaaccatcatccactctagaatcatcaactagtgctccaccaagtatgaaaccaagtgttaaacaatcatccagtgctcctaaatcttccttcacccctactccaagtatgaaatcaagtactagacaatcatccaggctaactcaatcatcgtatgtgtcaaaaccaagtagtagaccaaatatgagatcagcgtccagtttttcatattaatgatttttattagtgtgaatcatttcatgttacaaacgacgcagaaatagatgataaatttataaaagaaagaactaaagctataatttacaacaagaagtatttcatttcattaacaaacatttaagtattcatataatcaataattataactatttactggaactaaatagttatataattgaaattatttgaattattattttaaacatttcgttcgtttctatactcaataaaataagacatttacactatctcccccaaaatataatttaaataacctttcctagatatcccctctcgtttctctctttatatcttccctttataattataatagtaggcttaattaattaaaattaagattacgtaatattcataatgcatggtaatctcctgatttcaaatattaatagttaacggtaacttcattttcaactaccggtaatatttaaaatcagtgttggttctttattactattaattataccaataatataagcaatcaacgtataaatagttccagaaacaatagaataaaaaatgtacatggaaaaaaaaaaggtctcataacggttattaaacggttactcatccctttacagttaaattgctaaatgaacaatatttatataagattggaactgcacataaatctaccagtaccagtaccagtaccagatcttctagtatatgaataatagttgtaatgaatgtatcttaatgcgaagaagaagatgattaggtggttactatctactactccgcaatttagtattgtaatcataccactgaatatcatatatcgttgtaaaattgttctattgcttgaacttatatgcttctttttaaagtatactctattgtaactaattcagatattcttgtatactctaaattacttgatctaatttgaaatgagatacatattttagtctaatactcagtactaattataagtagtactttcttcgtaaatacaaatatatcagattcacttatcccatttcgtcaaaattctgtaaatacacgagtggtcaatataatgaaaatgaattaaatgaaataaatgaagtatttaaagtatggaaaccatgctctattcgtgtaaattatgatggatttcggttatatttcctaaaatagtaaagacattatttaaaataattattcttcaaatttcaccatcaattgttcaacatgtttaagtgtatatactactattattattatcatcatcatcattgtgattaatcgagggacataagatgagtctaccatatcttaatacccctttcaatttttaactcaacttcttttttgaaaagatggtataaatatggatggttagctccaatttgaattatatttacttatttggaaaaatacatttaactccatttttgaagtttaattatatttcttagattataaactaagtaaaacaatattcaatgaaatacaatatattggtatctttagtatttttttcaattttatcaagtcttacttttgcttatttattaccaggttgtactgatacagttacagttgttgcttatcagtctattcaattaccacttggtgcaaatgcaggactatcaagtaggagaactagatctgcaagatcatcatcaagttcaacttcaagtttaacttcaattttagtttcaacttctgaaataatttcagaaacttcatcatctggtatatcattagaaatttcatcaagttcttctttagaattaccatcaagcattacatctactgtactctcatcagttgaatcctcatcttcagaaatattttcaattactataccatcatcatccactgaatcgtcaagtgaatcttctaataattttttaacttcaagctcaagctctgaaagtttgagttcaagttcttctttagatttatcatcaagtactttatctacttcatcaatcagtatatcatcattatcaagtgacatatcaaatactacattttcaagttcttctgtgacacccctacattccttatcatctagtgtatatttatcatcatctagtattgtatattctccatcgtcttatgttattcaatattcctcatcatcatcctcatcatccttatcatcttatgtgatttcatatccttcatcatcctattcgatttcatactcatcatcatcctatccgattttatactcatcatcatcctattcgatttcatattcctcatcatcttatgtgatttcatattcttcatcatcttctttatcatcaccttcatcatcatctttatcatcatccagaattcaacaatcatcaaatgtttcacctttttcaagaatttcacattcagtttctaaaccaaccactaaagtatcatcattatcaccatcaagtattccaaaatcatcacacgtttcacctttttcaatgatttcacatacagcatcagttacttcagaatcatcatctataattccaaaatcatcatcatttgctctttcttcctcaacgacatctcaaacagacactgaaccaatttttgaatcaatatcaatcactcctatagctcttagctcttcggatagttcaacatcatcaacatcatcaacatcaactattccttcaagaagtactactactgtttattcatgtgattcatcatatgttgcaatctgtgatccagaaccaacaactattaaaggtggtgaaacattatatggttattcatgttcatttaatgatgataaaattaatggtaaatttaagaaagatagagccactactacaatttctgataaaaagtataaaatcaataattatactataccatctattaaatgtacagctccagctacaacaactaaaaaataataactaaatgaataatttcagtgtactgatattttacctttttttacttcatactcagatattcatataatcaatgattttaaactatttactggaactaaatagtttatttaatcaaaaattatttgacttcatttattttatttttcattcaattcgttttctttaatataatattcatattcacaatatctccccaaatatacacaaaataacctttcctaaatattccctctctctgctctttttatatctttcttttataataaaataattaaatttaattataataaggtacaagattacgtaataatcataatgtacttcacttgtgtaatgaaacgatcgatcgattcaatcatgtttagcaaaaaaaaatataaactatatattaactataacttattgttcaatagaattatataaaaagaaaaaaaagcaaaaaagttcttctgattgcaagtctcaaaagcaatgaattatttaaatgttttttcagttattaaataaagatattatcaaaggaaaatccgttaatcaaggaagatggggttttttcactgttaaacaagaagcagatggatctaaaaaattcaaagctagattggtagctaaaggaatcactcaagagctaggacaaaattatttagaaacattctctccagtaattgctatgaaatcgctaagattcatgctaagtttaagtttcataaatggctgacatattacacaaacggatgcaaagaatgctttcttaaatggcaaattaaagtatgatatctattttcaacctccagaaggatgcaacattaataaaaaccatatatggaaattaaacaaagcattgtatgatcttaaaaatgcacctctaatattttatcaaaccttttcggaagtattatttaaatcaggattcaaatcttcattattagatccatgtattattttttttcataaagaattaaaagtttatattgcaatgtatgttgatgattaattatttttagacaagttcaaatgaaaatattatgaaagttattatttgagggggagtattagtatttctttaagttcattgaatagcatagcatgtattgttaataatggtagatacgaagaaccaaaaattcgtgttaacatctacacccaatacatactattagttttggttagtgaaagaagaacaatcaagagtgtaatttaaaaaactggggatatgtcttgggtatttattgtaatttaatcatatcatatcatatcatattctattctattctggcataaaacagctatgtcgtatattaatttatcaacaaaactccatttgaaatacgcattatatgataaaaatacaagttactgtggataaaatgcgctttacaaaatcacagaacaccgacgctctaagagtttactatgtaaaatttcaaattcacgttgtatgtaaatttatctaacggcgtttaagcatgcctcttattgttagttttgagctttgtggtattttttatcagttgtgtggtatttctatttggtagcacattaatattaatgttctgttcttttatactgtacagtatcaatatatcttctaagagcaaacaacaaataaactatacagagctataagttataacaaatgtgatgtaaatgaagagtttgatatctaattattataccaacatctattaaatctacttcttttggttataatacgtaaattttcaaagtactacaatcttattatttgtattactaattacaatccattaacaatattgtttagtattattacacacaatcacaagtatttgtaatcaatatccataatatgtatattaccttcaaggtaggtaaataaatgatcatggaaataatttctcatagtaacaaaactcctcgttccctagcaacgcaccacggagatgatgctattttcaatggagattatcttaaaactccgaattccatatttatctattttatcactcttatcggtatataaataagagtattcctagcagtagattgtgagaaaggtaatacaatactataatacttaattattaaacaaacaaacaaacaaacaaacaaacaaaaaactatacaataatgaaagcagtaattttcggatcaacaggtaatgtttcaaaacaacttgcgactaagttagctaaagatggtgttgaaacagttgtcattacccgttcttcaaataaagcagatgaaattaaggcttttggtgcaattccagctattggtgatttaagtgataaagaatttttattaaacacattaaaaggtgcagattctgtatttgttttaattccattaccattagctgttgcaaattttgttgaagttattaataaacaaatggaattaattgttgatgctatcttaaaatcaaaagttcctaatgtcgtttatttaagtgtaattggtgcacataaaccaggtattggtggattagattttcattattataatgaacaaatcttgaaaaataaattaaatggggttttaaacagtctaaccattgtcagaccttcaagattttatacaggtttattagttaatttaccagagattgaaaagggtgaaattaattcatttttagataaaacgaaaatttattcatatgtttcattagatgatatggctgatattattagtgatattattgaacatccaccaaagagaggtaaagatgatgaaactatttctaagacaatttatgttgaaagtgaaagaattacagttcctgaattaactaaattatatgaaaagatatttaataaacctgatttaaaatggaattctatttcaattgataaagctgctgaagaaatggcaaaacttgggtttaataaagatacaattttaactatttttacctcattatcaccatcatcacatgatgaacttcatagtgaattatattctaatagagatgatgttacagttataaaaggtaaacattcattagaagagtttattacccaaatgaagaatttaaaatgattacttaatttctttttttgtaatggtatatctttaatcaagtgttattattactataaatataatgtgtactcgacttaacttttgatgtagactggtcaaaatgcaatgtatctaatataagttcagttgattaatttttttctaatcaatgattacttgatccttctcagtcgttctttgagtatagtaaaatagtatagaagtacctttaatttaattttaataataaatttaacaatatagataaaaaaacaaaactatatccctacttataatatgtttttaagcgatttaatcccacttatcttacttattactacacaagacaggaattatcgttatccatcaaatatcaggttatgcaccttaatgataataataatttgacgagaatatcggagttttacttgtaaacatgcacgcaataagcttatagtaagtagaaatgtgatccagactttctatttgtattatttcaaatgcttatctccgaatcgactaccctgtatatacatttccctgactgaaaaactgctatctttttttatttcctgaacaaccagtttagtccattgaagttgaatttttcaatttttcaatcaacttgccattagatttgcagctatctaaagtttatacttatagtaatttacttgagatcattagagtgttcatccgtcggtgaaagctactttcagcttcccagggtttagctcggatattatatcacggacgtaacttcccaattgggaagtgaacccttatgataaattttaattctccgaccttattatttgattatataatctgtctttaattttcggagataaatagtatttctcggaaaaagttgattgcaatatactataggtgttttgtttatacacatcagtattaccaatgggtatatataaagtcaagggtatcccaaattgtaggtcaggatgtagtaatgaataattccacttgtattccttctactattttttaatatttagttttaaatcaagtgttacttacgttaatttgctatgacagaccaaattgattcaagttcattaaatcgtgatgattcaaccgttccagaggaaatgaaatttactggtaattatgaagaattaaataaaacaattaatcgttcagttactcaagatattgataataatgtcatgactagattatctactttatctaaaactttatctcatatgaatgctaaatgaaatggaagttttccaattagatgaaaaagattttgacttagctaatattttacaatatttagttaattttaatcgtgaaaagggttataatatgaatgaaattgatgttgttttcaaagatttaacagttattggtaaaaatactgctgcctcagttttaaaagatgtatccgatgtttttttcaaacctgcttcaattatttataataaaattcaagaaagaaaaaatccaacctcttcttataatcttaaagatttaccaaatacaagaaaaattattagaaatgttacaggttttgccgctcctggtacaatgactttagttttaggtagaccaggtgcaggttgttcaacttttttgaaaacaattgcaggtgaaactcaaacttatcaaggtgttgaaggtgtattaaattataatggtattgattatgaaaaaatgtcaaaagctttaaataatcttttagtctataacccagaattagatgatcatttcccatttttaactgttgaacaaactttaaaatttgcaatttcttgtaaaactccaacaattagatatgatgatagttcaagaaatcaatatattgaaaatatgaaagatttatatgaaattttatttggtttaaaacatgttgaaaaaactttagttggtaatgattttgttagaggtatctccggtggtcaaagaaagagagtttcaattgctgaagcaatggttacatcagctaatgtttattgttatgataatgcaactagaggtttagattcatcaactgctttggaatttgcttgaagctttaagaacttcaactaatatttataaaaattcatcaattgttactatttatcaagcttctgaaagtatttatgaattatttgattatgttaccatcttatatcttggtagacaaatttattttggtccaattgataaagctgtatcatattttgaaaatttagggcttttggaaaaatcctcgtgaaactagttcagaatttttaactgttgttactgatccattagctagaaaaattaatccaaattttgaaaataaaaagagtattcctcaaacagctgatgaatttgaacttgcttggagaaattcacctgaatttgctgaattagaaaatcaaattaatgaaaaattattaatgaaaaaagatcctgataatcaattaattcaattgagagataatcataatttagtcaaacaaaaatatacttctgaaaaatctgtttacactgtttcttatttcactcaattgaataattgtttcaaaagaagatttcaaactgttgttaacaatcgtgcataccctttaactttactttttgctgctgttgttcaatcattagttactggttccttattatacaatactacttatgatactgtcggtgcattctcaagaggtggtataattttcttttcatgtttatattttgcacttatgtcattagctgaaactcctgctttattcttagataagccaattttaaataaacaatatggttataaattatatcgtccatctgctgaattacttgccaaacaattaattcaattgcctgttaactttcttgctattacatttttttccattattctttactttttatcaaatttgaaaacagaagctggtgcattttttcaatactttttatttgtcaatttagttgttcaagctgttagttctttatttgttatgctttcatctattatgcctgatgcattctgctgctatgggtatttgtggtcttacaatgatgtcaatggttatttattcttcatatatgattcaacgtccttcaatgtattggtggtttaaatggttttcatattgtaatcctattttatatgcttttgaagctatagttttaatgcaatttaacaatttaaagatgccatgttctccatttgaattaattcctaatggtccaaattattctaatattgatactaaactaaatcaagtttgtggatttgttggtgctgctgcttctaaaactctttataatggtgaaaatgatgttaatggtaatatttatttagaattagctttcacttatacttttaatcatgtttggagaaattttggtattatgtttgctttcattattggttatattgttatttcatgtattattgttgaaaattataatcctataattgcatcatcagataaattgattttcattaagaatgctagaattactaaaaaaatgtttgaccattttcgtttaattgcatctgatgatagtgctgaaattgaagttgacttagaaaaacatgaagatgatattagtgccactgcagaatctataatcgactctgaatcttatgattataagttaggttctgaagatattttcacttggagaaacgttaattatgttgttccttatgatggtgctgatagaaaattattagatgatgttcaaggttatgttaaacctggtactttaacagctttaatgggtgaatcaggtgctggtaaaactactttattaaatgttttatctagacgtactgatgttggtgttattactggtgatatgcttgttaatggtaaagaaatgggaaattcagtttgaaagaagaactggttatgttcaacaacaagatgttcatattgcagaattaacagttaaggaatcattattatttagtgctagattaagaagaccaagaagtgttcctgatgaagaaaaggttgaatatgttgaaatggttatgaaaattttgaatatggaagattatgcagattcaattgcaggtatttctggttatggtttaaatgtcgaacaaagaaaaaaattatcaattgctacagaattagttgctaaaccttcattattattatttttagatgaacctacttcaggtttagattctcaatcttcatgggcaattgttcaagtgttaaaagatttagctaaagccggtcaagcaattttatgtacaattcatcaaccttctgcaacattatttgaacaatttgatagattattattattaaagaaaggtggtcaaactgtttattttggtgatattggtactgattcaagaactgtaattgattattttgaaagtcatggtggtagagtttgtgataaaagtgaaaatccagctgaatatattttagaagttattggtgcaggtgcaactgcttctgtagctacagattggtttgaaatttggaaatcaagtgatgaatttattaaagtatcaagggaaattgatgaacttcttgaattaggtgcattagtaaataataaagatatgacaaataaagaatttgaatcaaaatatgcaaccccttatagttatcaattatatgaagttttaaatagaacatttgttcaaaattatagatcattaccttatattatgccaaagttttcattaacattacttgcaggtttattaattggtttttcattttgggatgcaaagcatacagttattggtatgcaaaatgttatgtttgctaatttcttatctattattgttagtgcacctttaatgaatcaaattcaaactcaagcaattacatcaagagaattgtttgaaattcgtgaaagtaaatcaaatacattccattggtcttgtctattattatcacaatatcttaatgaaattccttattcaattgtattttctacaatttttttcatttgttggtatttcccaattcaagttgattatgatgctccttatgctggtttatggtggtttacttattgttttttcttccaattattttatccttcatttgctttaatggttctatatgctgctcctgatttaccaagtgccaatattttattaggtttacttttcagtttttgtatcagtttctgtggtgtttttcaaagaccaaatttgatgcctggcttctggaaatttatgtggagattatcaccattgacatattttattaataatcaattaggtgttacattacatgatagaaaagttacttgtagtaaaactgaatataattatttagaacctccaaatggattaacatgtggtgaatatttagatagttattttgatgataatactggttatgttaataatccaaatgatacaagtaattgtgcagtttgtcaatattcagtaggtgatgagtttttagagagtgttggaattaattatgatgatagatggagaaatattggtttcttttgtgcatatattggttttaatttatttttaatgttaggtggttattatatttttagaattcaaagaatgtctcctaaaaaattgattacttctcttgtatcaaagattactcgtaaaaataagaaataaaaattattcaatttagttagttatatagttcattaatattatttattttattccataattttgtatttagtgtttaaaaatatagtttttttcaatcattatttcaatcattactataattgatttaacagaaaaagttatacaatttttcaagaattgaaataattaaaggaaaaaagttttttggttttgattgataaaacttttgcaatagtttaaagtttagaagattccaagttataatattagtcaaagaaaaattcttcattaccaattttcaaagcttttgtaacagctgaacctggaccaccaaaaaaagattcatcaattcttaaatgtaatgaaggggaataactatcaggtttaacagcaacatattttgataattcctttgatttattgaaaaaagaatgtaaataaacactgttttccttcaaagtataataaatttccatttttcaatgtttatttttcaatgatttgtggcagtttttttttagatgcttttcaagctaacaattttgttactttttgtcagtaactttatatgattagtatctcattttgtttagttatttctaaaacattatttgatgtaaagtatggctggaaatgttttttcaatataatgttatactttaatgttataataataatgctgatttcaaagctttttgtagtagttgattacataaccaaatattcaaaattcatgtagcttacaaactaataatgagttctttaaccctacagattcaaagtttaaatatgtatttgtattttaacgacttttgttcttattagcttgttattaaaaattagatatgtagtaataagtaggtgttaaaattcaaagcaaaatcaattatttcatgaaatgataaaaataaagttcgaaaactaagttaggtaagaaagcaccactttattaagtattgtaaatttgattttaaatctccatctttagatctatgtattattttttttataaagaattgaaagttcttattgcaatgtgtaggttgatacaaaaattcgttttaacatttacacccaatacatactaatacttttggttggtgacagaaaagcaagtaaattaatcttatcttatcctatataaatttatttacaaaacttcatttgaaatacgtattaaagattaagtatagtaaattttaaattcaattgtaataatgcatgaaatcatcactccattaatacttatattactaatcaaacactcttataaacaaaattccttgtttcctaaccacgtaccacggagattaacggtatttccaatggagatatatcttaaaactccgaattccatatttatctattttatcactcttatcggtatataaataagggtattcctagtagtgaagtatacaagaaatataataaaccttaataaataagtaaaatactatacaataatgaaagcagtaattttcggatctacaggtaatgttgcaaaaccactttcaattaaattagctaaggacggtgttgaaacggttgttattacacgttcagcagataaagcagaggaaattaaaggttttggtgcaattccagcaattggtgatattgatcatggtgaatttttattaaatacattaaaaggtgcagattctgtatttgttaattctccattaccttacactcaaccaaatattgttgaattaatcaataaacaaatggaattgattgctgaaactattttacaatctaaagttcctaatgttgtttatttgagtgcagttggtgcacataaaccaggtattggtggattagaatttcattattataatgaacaaattctaaaaaataaattaaatggtgtcttaaacagtcttacctttgtcagaccttcaaaattttattcaaatttattagttaatttaccagagattgaaaagggtgaaattaattcatttttagataaagagaaagttcattcatatgtttcattagatgatatggctgatattattagtgatattattgaaaatccaccaaagagaggtaaagatgatgaaactatttctaagacaatttatgttgaaagtgaaagaattacagttcctgaattaactaaattatatgcaaagatatttaataaacctgatttaaaatggaattctattccaattgataaagctgctgatgaaatggaaacttatggatttaatagagatacaattttaagtattttcaccacattatcaccacaattccatgatgaacttcatagtgaattgtattctaatagagatgatattacagttattaaaggtactcgttcattagaagagtatattactcaaatgaagaatacaaaatgatcaattgatgattacttaataattaattaattagtaatgggaattattattattattaataagattacttattcatcttttatttctttgtaatggtatttataatataatttataagtttatataactttgaatatgaattactgttattataaatactcatgtaatgatctattggtaaatttttatacttaattcttcttttttctttctttataataactaattaatcatattatattatatgtcacaagataaaatggtttcattaagatcaatttttaaagtaatttatgcagctgaacaagcagaaggtgtaggtgctagagttagaagatcaattggtacttcaggtatgagaaattttactccatttcttatgttagatcattttaatgtttcacctgatgcaggtttccccgatcatcctcatagaggtcaagagacagttacattagttatgaaaaattatatgttacatgaagattttacaggttcaaatggtatacttagaccaggagatttacaatttatgacagctggtaaaggtattgttcattcagagatgccatattcaattgatggtaaaaatgttgaaggtatgcaattatgggttgatttacctgaaaatttaaaacattcaaagccaagatatagagatttaagatcagaagagataccaattgttaaaccaaatgataaagttgaagttaaagttattagtggtaaatcttatggagttgaatcattaaaagatttagcttatacaccaatggattattattggtttacagttttaccaggtggagaatttgaacaatttattaaacctgaatttaatggatttttgtatgttttaaatggttcaattgaattaaaagataagaaagatgaaaaagatgataataaatttgaaaaaattaatgaacattattcagttttctttaaaagagatggtgattttattaagggtagagttcccaatgattctaagaaaactgattttgttattattgcaggtcaagcattagatcaaccaattgttcaatatggtccatttgttgaaactactaaggaaggtatttataatgcatttaatgattatcaatcatcatcaaatggatttgaaaatgctagaggttggtcatcagatattggaaaaggagttgatgaaggtcttttcagagttaaatcaaattcattatcaagtcaaggtttaccattagaagcaaaagatcataaaattattctaccaaaggatgaattgtgagtttttttctattattcttttactactattctattattcttttactattactattattctattattctattttataaacttatataactaacacataccatgtataataacctataataaacctattaagactcaccccgtattttttcataattcgcatataataataataatgagaggctgaataatttattaactctactggtaacggttttcttttagtttgttatacagacaacgaacaatggctttgaatactagtctggatgcaggttcaactcagacgagacagagagcattatattcatgtgatagatgtaaaaagaggaaaagagcttgtaaaaggtataataatttaacaggtgaaagatgtttcgataattcaactcaatgtgaaaattgtgcattatcaggtgtaatttgtcaaacaacaataactagaaagaagagaactttttattcagttagtgaaagttcaatagttcaattaaaatgtttaactaaaattgttaaggcaatgttcccagagagtgatccaaatagttttacagatattgaaaatatagctaaattattatatgttgatttacctgataaggaaaaagattgtaaaattattgaaaatggtaaacgtcgtgatagtattaaaaatgaaaatattgtagaggataataatggtattattgatgatgaagtggaggtggaggttgaagaggatgtaataaataatcagacaataatatctccaatatcaaatgaaggtacttcacctaatatcaatattatcaataataaagataatactaataaaaataataatgtagattcaagtccaataatatctactaatagagattcaaattcactagtaaatttgaaaagaattgcagatgagctaggtacattacgacataataaaagaactaaaattgatgaaaaaaatataaatacaaatacaaatacaaatataaatttaaataatttatcaaacaataattcaaatgatgatcatcaaattagtttaggtggtgcagaacgtttattcactgctttattagaagttgaaaaaaagcaaggtcatcatgataaattaccaatgattgatcaaaataatgttttaacttcagttaaaagtcaacatcaatatacaccttttaaaccaacttttacaattgcaggtaatgatattcaaaaatattttgtattaaatacaatacctaacgatgaatgtgaaatttatacaaatttcttctttgaaaatattgatgatgttcattatattttcaatgaatcaaaatttaggaaaagacaaaatcattttttcgaaattttaaaggataaatcaaattattatgaaaaattaaaacaggaaaattttagtaatgaagaaatttgtacaatgtatattgtttggattttaggtaggaaaggttatttattaaatttgtttgttaataatagagaaaaattaaataatttaaatttagtttcagataatataataaatgatcattttaatgcaattcatctttgtctctcaaatattttcttctcaaataatttatcaactgttaaattactttattatacaagtttatatcattcaattattaaaaatagaatttcagcttatcatttaatttcaaatacttgtttaaaacttatttgtttaggttataatagagaatataatgttcaaaatttatcagaagaagaacaagaagatattagaattacattttggtcatgttttaaattacatatgactaattgtgcaattttaggtagattacccaatatatcattatatgaatgtgatattaaattaccaaaattatctaatgtaaaggaagattttttaaaaaaaattcatttagcatcaattgaattaattaaaataatgtttttaattttaaaaaatagagaatatttaacaaaatctaaagatccttggactcatcaaaattatcttaatgtattatttattaatgataaattattaaaatgggatgatgaattagattttaaaattaaacattatcaaagaccaaaacctcaaagatcacaaattaaattacatattcaatatcattattcagttatttgtttaatttcaccatatttaattgcatatgcattaaaaccaactgaatcaattaattcaaatttagattttattaaaactttatgttatggaattaattcaagtgttaaaattgttaatgttatactttattcatcaatttatcaaaattttaatggtttattatattatgatttatttttcgcatataattcattaatggttttattattaggttatacattaattaaaaattcaattgattataaatgtaataaatataatatttttacaaatattttacaagaagaatttaaaattaatttatcagttattttaaaggcagttaataatattaaaggaattaatgatagatatggttcaactgcaataggtttaatgaaagatgcaagtagtaatataacattacttttaaaacattttaaaatgaatgattttatggataatgatgatgatggtaataataatagtaataataataatgataataaaagttttaaaactaaggaaaaagaaaagaaacataaatcaactaaaaaacattttaaggaggaacaattaagtactattaatgaacataaaatacctggtaatattccaaacaatgtttctattaataataataataacaatttaataaaatcaaccttactgaatatagatggtagtatatcatcgaattcttcaacaattagtaaatctgattcaaattctaataatccatttgataatacagaatcaacaccatttgaatatggtagtgtaccattattaccatcatcattacctcaaataccaataggttcattaaataataattataatattccaaatttatattcaaataattattatgatgaaaatatttcaccaatttcacctatagttaataataatattggattaacatataataataatttaaataatagtgaagaaactcaaccatcattattaaatcaacaacaaaatcaaaatcaatcaaatattggaatggtgaaacaaaatagtgaaataatgaatagtgattttaataatttatcaacattagataatgatttcttagaaattattaattttatgaataaagatgtagaaaatacaaatgattcattattttgggattggaataagttattctctgataatgtatcacaaaaatgattgtatacagtctatataataataataactatttatatcgattatttttcttatttactttaacaacatcaccaatttcagtctttgcacgttcaagagttataggtttactaccaacatatttaccattcatttctttataacatttaagataatcttcaggatctgcaaaacttataaatgcaaaacctttattaatattttgcttttgattatttgaatctttaggtattttaacttttgataatgatggatatttaataaatgtttcaattaatatttcttcagttacatcaattccaatattaccaacaaataatctataatgatttggattccattcaactaatgatgaatctaaccatgttttaccagttttaggatctttccttataattgctttatcttcctctatatgattagattttaattttgtaattgtatctacatctactttagatttattgttactatttaaatattgatctggtctataacctgatgctgcacgtctatctgatgttttatatgagttatacactcttttagaattcttagtaatgggtttagttctgttcattaaagttgtagtgaaaagaatagtattttattaatgttattagaaaacttttcatgttgaattgaaatcgctgtttaagttaatgcatgtttattttgaataaagactgttatatatactatagacaatgttattgttagtgaaaccacttataggtggtagaatattcagtgggagaatagtaccaattgttaaaccatgtttgaaaacatcatttataatgaataaaccacgatttttccataattcttcaataatattcaataacaaggagaagaagaatgatgatataaataaagatattatgataccacataaaggtacacaaatttcatctgatatttatgaaaagaaagaagttatttcaagacgtgtaccaggtgaaactaatcaagataatgatattaaatcaagattcccaacatcattaaattttgaaaaagaagcagttccaacattattaccaagacctggagtacctgcaccaaataaatatccattagctagattatatgatgcattaactaaaaagactgaacctgaattaatttatgaagctgaaccacataaattatattttgtattttgttgtgcatttgctttattatttgtaatttatggtattaatgcatttaatattggttataaattagcatttgcaatgtttgaagataatgatatgaaattaaatgaatttcaacaaaatttacaattaattatgcatttatcaattgttacaattttagcttcattaccattattagcaggtattgcatttttattaattccttcaagattaattagaagaatttggtatttaccaccaattggtgtaaatggtcaaattagacctgatggtcaatcatttattaaatttacaactcatccaattttaccaaatagaccaactccaatttatattttaccattaggtacattacagaaaagtttaacttctaaaatttatagtggtaaaggattttatggtacaaatgattcatcagtttttcttctttttaagagaaggtcaaaagagaataccttttattgttgataggaaaggtttcttttggggtgatggtagagttttcgatttattatttagtaatgattcaattgataaagttgaaaattctaaaaaaattgatgaaatttatggtgatatgattagagagaggaaacaaaaggaaattgaaatgaggaaagaattaggttttggttggagaactaaggcaagtgctaaattaatgaaggaagatattgaaaaattaaagaatttagttactgataaatctgttccaacaattaataaatctgaaaaaaatgataaatctattaagaaataggtatttttaagtattcactgtatatagagatttttgtagataattaaaaataaattacatcaacataaccaatttttttcgatatataatacataataactttccttgatctatcaattctaaaattatacccaaataatttaagatcatttaattcacttttaggattattcactaatatatctaatgcaaaattcttttaaaaacttttgccaaaataaaatcattaaatcactttcacgttcattgaaaatttcaacactttgtgaaatataaccttcaaaataaggttcattatgttgatattgaccttctcttgcaaaataatcactaatttcattttcagttattggtaatgaatgttctgtaataaaccaatatttcatattatgtacaattttcgatctaataaaagcatcaaaatatgttaattgttttaaatttttctgattttgtataatattaatcagtttcctataatttaaaccatttaaagtattaattgaaatccatagtttatgtattgttgtatgttcagtcaggaaattcagtactgaataagtttgacaaattttacaatttctgtgactttgaattgaaatttcttcaatattatctaaatatagtgagagataagataatgttgtattcatatgatttaatgaattattattaaaacaattcttatgacttactcctttatgagagtattcgaaaaggattaattttaatgatttgatttgtctaaatggtataagttgatttaatgaattaatcatttcacgttgatttcctcccatgaaacaatcgattaattcaagtttagttaagtttttgaaaatgaattcattattatgttttttaatatctgataaactttcaaaaaatgaaaaccatacaggtgtatccttagtaccatgaatatcagttatatttttcaacgttaaagattctaaatttttcaatatattaccatattttaaattttgtgataattgtgaaaagttgagtatctgtcccccattcatatctaattgttaattttttcaaattttttaatttttcaattggtaaattacaatcatcaatttgaaccattatatcaagttctttaagttttgaagtatgtaaaatcatttttgatatattagtaattgaaaattctggagctgaaagtttctctaaatttggtgatagatcaagtaagtatccaaaactatcaaataatgtaagtgattgattaaagaatgggaatttattttgtaaacacgttatttcatcagtggaaaggaaattatctaatgtttgattccaaactgtctcatcaaacttgattcttcttgtcatatctgcaaatagttcaattgatttcacatatgatccaatatgttgattagttaaaactttatagattaataatagtaaatttttcgaagttttaataattggaatatttttctcaagcatcattatactgttcttaaaaccatcagtccatataaaatcaaatatagtattttccattatattttgtctttcaagttgtgaaattgtatcaattcttaaatctttgtaaatatgtgaataaactttacacctaattgcagaacatgtcattgataatgaaattatatccattgttgataaatcttgacaaataatatctaaaatatcttcacaacagtcggagaaatgattgattgacatgtctgtgttgttcttcttattattggtgatagatacttgatggagttgatatttggactttttcaatgaaccaacggatttcgttccggggttgttccttttaagtgtttgtgaatttaaaggagtgggtgctttgttaactggtttctctgatggtatttcctctgacgatactttcataattgattggataataagagatagtactcaaagaagaacagacaccataagaattaaaagaaaagataaactttttcagttgttaaaagataaaattttttttattatgatctgtgaattgataagaaaaaatattttattttattctattacgtaatacccactatagataaccattcactaccctttgtacccaatgtatccactactactgctattacttcctcctatgaaggtatatggtactgttttatctctgtttgaacagcttattaggaacaggaaccccttaagacatatagtttccagttcagttgggtattttctcaaatactcctgacctattcgaaacagctctacacatcttttgatattctgtgtttcaatagtatgtatgaaatgtactgtaaatttattatctttatgtaactgattgaatgtctactggtttacgtgctagtggttaatttctttaattcatctaatgttattgaatcaattgtttcatatatgtttttagttgttaatgaaagtgaacttaaaatcatcatcaatccaatcactaaaactatcatctttttccttaaattcttcaagaattgtacgtttatcattatccatcatatcctcttctccttcttcttcatcatcattatcatataatccatcaacgtattgtaatactttcctattcccacttaatatccatttagtatttaataatgttttagctcttgctctaattgttggttgaaattcaaaacacatatttaaaaattctttacaattattactaatattaattggataattaattttttcaccaataccaactttatgacatgcaattaatggattaaaattaccaaatggtggtatacctgttaacatttcaattatagttgcacctaatgaccaaatatcagattttggacttgccattttatgtaaaataatttcaggtgctaaccaataagctgatccattcattacaattttttgtaatcttttattattatttctattatgatcatcattataatcatcattattttgatcatcccattggaaacttaaaccaaaatcacaaattttaattataccattattaaaaattaaaatatttgatgctttaatatcaccatgaattatacttttatttgataaataattaattccatctaataattgacatgttataccacatgttataaattcaggtataccattttgaggtttaaataatttaattaattgatataatgaaccaaatgatgaatattccatagttatacataatttttcactactatctttatcattatttttgataatattataattaatcaatttaacaatattaatatgatttaattgtttcataattaatgcttcattaattaaactatggtatattttatcccttattgataaatccacggtatattttctttgttgatgtggtgattctttaagatatttttcaataactgaattaatatcaatttcctttactgcataccatttagatgatttattattaggtattttgtatattttaccaaacccaccataatgcaattagttgtttatcattgtagttcatttattaatacatgatactctaataaagaggtgtctattctactttatccattctctccattaattcactaagagatcaatcataatattcatgtaatgttaaaaaaacggttacgtaatgcagacgcgactatttatggggctcaactatataagataagataagataataagataagataagaagtatttaacagtttgatcaataaaatagcttttcatcagaagacttctaaataataataataataataatacattaaatataaacaggataataaataattaataaattaatgggcaaaacggaaatctaatctttgagatccttgatctgtagtatttttaatataataatcttgttcctcaggtgtcattgcatcccatttttcagctctatttttattaagtttccaataaaaccatttacaacctaataaaattgggaacatacttaatgcaaatgcaaataaaactgcattacctgtatgatataatggtttatcatttttacgataaatatttgatgcaataattgcacctgcttgaacaaacatattataaactgatgcactaacagttctagttttaatactatgactatttcttgaaacaattgaaaccatcattgcatgaatatatggataacctaaacagattgttaaaactgcatatgtgccccaatgattaactaaactacctttccaaaatcttaaaacaccaacacaaattgtaccccaaattggttgaattaaacaaattaggaaaatacttgaaaatttttcacttagataagttgatgttaataacattataatttttaaaacattataaggaatacagagtaaatttgtatggaaagtactaaatcccatttgtcttaataataatgtcatataagctgtaattgtatgttctggcatataagcaacaataccaataagataaattggccataaacgccaatcctctaaagcttcccaaatcatttttaaacttaaaccttgtctattatgcatatcaccctttgttggatcatctcttaaaactttattaacaataattttttcttcctcttctgtaaaccaacctttttcattccaccatttctttgtttgaacaggtgatggaaccattaatataaaaccaacaataccaacagttaaagtaataaaaccttcaattaggaataaccatgcccaacctggtttaccatgtacaccacccatatgtaaaataccataagcaattaaataattaacaatttgtgttatatacattgcagtccaaaaaaatgataatctaattggtaattctgaacttgtataaaaatatgataaccaaagaaccatatcagcaatgaaaccaccttcaaaaatacctaataatgctctacatgcataaaaactacttttaccatttaatttaaattgacaaattgttataattgaccaacaaataacttgaattggaatccaaatatctgaaccaatttttttagaaattaattgtgatggtaattcagctgcaaggaaacaaacataaaaaattgtattaccagtattataatcattagttgataatttaatatcttttaataaattatcagaaactgcttgacctaaatttgttctatccatttgtaaagcagtgaaaaggaaacatgcaagtaatgtaacataaaaatctaatttataagttaatttcttttgttgtgccttagtccatttaaattctggatcaaatctttctctacattcatattttgcatcttcataaatagctgcatatttttctctgaaaacttgattcgtaaatggattatttgcagaatctggtgcttcatcataattttcatcaattgatgaatgatctttatctgagatatattcagtgttaataaattcttcctctttttttaatgatgatatactgttatctgatttattagacattagtgaattatatccttgctatgtgatatctagtaaaaaagaatataagaagtgtaaaaaatcttttcataataccggacccttagctatatttatacaacagtctgaataattccaataccagttattttggagggtacattacaagtaccattacaataccattacaataccattacaataccgttaccagactgaaagcagtaatgtcaaagatttgaaccctggagataaaacttcccaaataggaaatgatgagaatttcatagaaatttagtgtggcagagaatatattattattaatatgtggcattgtatccacagtttgttattatattatattatgaattataaaataaagactatataaagagatatatccatatccattatggcttacatctaccactgaatcttggatataatgaacaatctctaactgtaaatctgttacataaccaagctaaaattctttcagtacctaaaccataaccaccatgtggacatgtaccataaactctttgatcaataaaccaataatatgatgatggatctataccttctcttttaaaacctgcaattaattcatcaacattatcaattctcattgaaccaccagtaatttcaccaactgttggcattaaaacatcaacactctctgtaactcttggatcatcaacacatttcttcatatagaaatgatttaatttcaactgggaatctatttaataaaattggtacaccaattgtatctgtcatttttctctctgcagcttctgcaatatcatcaccaaatttaaattctttaccttcttcatttggaataccattttcatttaaccaatcaattgcttcaatatattccattctcttaaatggcatttgtggtggtacaaaacctggatttaattgtttaactaatggacctgcaattggatcttctaaaacatattgaatagttttagtaataacagtttcaatatgtgaaagtaaatcttcaaatgataaaaatgctaattctgcttcaatatgagtatattcacttaaatgtcttcttgtatgagatttttctgcacggaaactttcttgaatacaataaacatcacctaatgcaggtaataaagtttctaaatataattgtgatgattgagttaaaaatgcttcttcaccataataatccattttaaataatgttgaaccaccttcaacttgagtttgaaccatacatggaggtgtaacttcacataaattttcttcttgataaactcttctaattgatgctaataatgatgcacgaactttcataactgctgataatgtttcacctcttaatgttaaatgtcttctatctaataataatgaaggatctgaatcttctgcaatttgatttgtaaatgaatctttaccacttggtgctaatccaacaatttcataataatctgcaactaattcaactccacctggtgctgatttaccttcaggtaatttaacaattgaaccataaattgataatgttgattcaaccgttaattgttgagtttgatatgcatttgctaaatcacctgataaaacacattgaatataacctgaaccatctcttaaaacaataaatgcaacacctttttgaactcttaatctatgaatccaaccttgaactttaactctagcaccaataaatttagaaacatttaacatcttgattttttctgcctttggtaatgatttatcttcaacaatagaaattttcattgattctaataattttgcactttcctctgcatctttggaagctttttcttctgctaatttcttagccttttcctctttcttctttaaaccttcaacacctttctttgctttctttaaggcagaagcggaaatttcaaaataacctgcttcagtttcttcagttgcatctttataaatttcaactttagattctggtgaaacgtataatgcataagcagcagattgatatggagattccttagtacctgatgcagtatctgcatcaacaccagtagtaggatggacgtaaacagtagacattatctaatgaaactgaaaagaaaagcagtagtattaaataataaaataatgaatcatcaataattttccaacgtccaaataatttgaaaatctccaatttttttgaacgcagtgagggtaaattaaatttaaatttcatcgacatgatattttccatttcgaatcttatcactagggttttccttttggttggtttggcaagaagatcaatataggatatgttgagaacagtgggtaaactaacaattcgtaacaaaggaatgagacattatcaaacattacaatctctcatcaaatcatctccctatactgaaaacttaaaacctgattccaaaagttcaaactccgggacaagtaactgaaaaattaagtaaaataccaagacaattaggtgaaaatggtggatttttcacatacacttatccaactgaacgtaaatcatatagatttttatcagcatctaaaagagcattagaagatcttaatttagatccaattaatgaaccaaaatcaaaatattttcaagatattgtatcaggtaaggaagtgatcaaggatgataaaattcatccatttgcaatggcatatgcaggtttccaatttggtaattttgcaggtcaattaggtgatggtagagtaagttaatttatttcaagtaaatggtaaaaatgatagagaatgggaattacaattaaagggtgcaggtaagacaccatattcaagatttgctgatggtaatgcagttttacgttcatcaattagagaatttattatatctgaatatttaaattctattggtataccaactacaagggcattggcaattactgcattacctgaaagtaaagcacagagatcaattgttgaaatttgtgcaattgtttgtagaatgtcaccatgttggattagaattggacattttgattattgtagaatgattggtgatagagatttattatttcaattatgtgattatcttaataataaagtgctaggaaatgaatatagtaaagaattgaatgaatttttggaaaatgatgaaaatttgaaagaatttggtgaattaacaaattatgataaattatttttagatataattattaaaaattctaaatctgtttcatattggcatgcatatggatttttaaatggtgttttaaatactgataatacatcagttttaggattagcaattgattttggtccatttgcaattatggataaatttgatccaaattatacttctaatagtgaagatcatgaattaaggtattcatttaagaatactccatctgcaatttggtttaatatgattaaattaggctgaatcgatggcagaaatattgggtgcaggacctgaattgattaatgatgaaaattttaagaaatatggataccctaatgatgaagcaattgaaaatgcaggtaaaagagttaataaattaattagaattgcaggtgatatttttgaaaaaatatttattgaagattatttgaggattaatttgtaatagattaggtattaaacctagagagaatgataatgcagagatattaacgattttatttgaaactttacaaattactaaattagaatataatgaatttttcacaattttacaagaaattaaattaagagatgattaccaattttgattatgatttggcagcaagtgaatttttaactgatgatttgaaacttgaaggaaaggaagaagagagggagaaaataattaaagaattaaaatcatttttagcagttttcaaattacgtgttgaagatgaaatgttaacagatgaggaaagatttaatagatgtgttaattataatcctaaatttataccaaagaattggatattacaggaagttattgattatactgatgataaattaagaaataatgctagtgatgaagaaattagtttatatattaataaaattatgaaaatgagtgaaaatccatttgataaaagtaaatggggtaatgaattaaaggaattggagaataaatggatttctgatgttgatgattccaaactgatgttacaatgtagttgttcaagttaagtaaagataatgtttatgtatttatttatgtattttaatgtttataaaaatgaaagcctataaaattaattagctaatttttcagtaactaaggcaaattctttaccttgaattttagcaatttctaattctaaatggagttggttctcttttaccatcaggaccagctaaagtacctgctccccaagctgaaccaccatgaacttcattaatattacttaattgagggaaagcacttgcataacctaaggaacataaatcattgaattatgaacaaatgttgataatgcagtaacagctgtcatttcattaccaccaccagtaccagttgaaacgaataaaccgaaaggtttatttttcaatgaaccatttgcccataatgaaccagttgaatcaaaatatgcctttaattgagctggcatattaccaaatctagttggtataccaattaaaacaccatcacaatttgttaaagtatttaaatctgaaattttataaggtaatttacctggtgaacctaattttttcaataattcatcaggtaatgtctctttaacttgataaattgttgcattattaccagttgattcaatacctgccttgacagattctgccattttagcaatatgatggtataatgaataaatgatgatattaatttgttttggtgccattgtctgattgtctgattgtttgattgtttgaagtggaataataattgacttagaattcgtgtactttactatctatttatactcataagtatacatctcttaataatcagccatatacctattaataatcattactaagtatctctaaaatacgtaatgcatattatctaatcttttgataagggtcctttcccttattaacatgcatctcggagttagtgcacgtgactccgggcgttgtttcctttttgggcgcgttgttgacgttttgcccaaagaggaaatgctgatgtttctgtacatgttgtcgattcaatatttgataatttaattttaattttaattttaatctttaatctttaatagaataaagtttgtcattgtagtgattctagtataaccaagttgtttcattagacataaaccatgtctgataataatctcacatctgataatactaacaatgttaaaattaaatcaatgatacctaattctaaatcaagaaataacttattctttaacactaccacatcatcatcatcatcaacaaataaatcttcaacaatattaaaatcaacatctcaatatattattcaacaatcgaatgatgatatttataatgaaaaatattggtcattaatgattccatcagctgcttatttccatatctataattccgttctaggtgatgtatttgcaatggtttataatgataatttaacaaattcaagttcaaatactttatcaacttttataattgctaaacatggttgttcagtttatcctaatattgatatatcatcaaattcattatattattcagctattgaaaatttaaataatgaatttaaatcaagtaaagttaggaaagctttagctatctccttattgaaaagttttgcagatcttaatgatgatatgattaatactttatataaacaagctaatttgccaataaatacttttgattgggatgaaactcaagcaggtttattagcttctcaaatgagtttaattaatactaaatctcctattgatgttggttcttatttatatgatttaggttatttaacccaaagtttatcaactggttcatatgtcgttgatgttatttataatgaagatccaaatgataattcattatctgaaaaaaataatgctttggctttcctattgggtaaacaattagaacaattatttgatccattgtcggaatattctcctgaaccaacagagaaagcttataaacctccatctgatataaatgaaaagcttttaaataatattactactaataataataacactacaaatgacataaatataaatatacaaattgatgaagattcagacctcgttaaatcaatatgttcagaattattatcagttcaaactaactacactgttcaattagttcaatttttacaaaattttgttatacctttacgtattcaagttttagagaataaattaccaggttttacaacaagtcgattaaatcaattattccctccaacaattgatgaagttactagaattaattgtatatttttagatatgcttaaattagctcaaccttatggatcttatgaaattttaaaagcttgtggtaaaacaattccttatttttataaagctcaaatgagacatgaagctgcaattaaaaatttccattcagattatttaaattttattaatgaaattaaaaaaattgataaattaaatttgttaacaatggatcaaagatcaattgaaactgcaatttattcatcattaaatttagttaaaattcaattaattattcaaagattatataaaaataaaatttggcctaaagaattaatagaaaatgttaatctattaaaagattcatgtgatacaactatatcatcatttgcaaatgataaattaataccctataatggtagaattttcactccaactggtaaaatattaacagaaattgccaaaggttggccatcggaattacaaaatggttggttaactagaagagttgttgcagttttcgatgcaattgatgtacttaatcctgaaattcaaaataattcagttataataattttcagtgatcatgttttatttttatcaattgatgatgatgaatattattataatttatggaataataaagaaaaaaatttacatcaaccttcaatttcagatattttaatgcattcattaacaaatgaaactcctttaactaaattacctcatatgaatgttaaatcttggtgtaaaattaattcacttaatgcattatattatacaagtaatatagattcattatttatgactaaaattgattcacctaattcttatattagatttttcaatgaaaatgatccttcatttacaggtatttataaattagaaaaagtttcaggtaaatatgttactgaagttattgcaagatctaaaatattaaataaatcacaatcatttcatttattttgtggttcaatagaggatgaaaatgaaagtgtagaaaacatcaataacaataaggaagagaaaataagtaaaaaagtttattatactgcacatgaatcctcaaattatattgaagaagaaactaaatcaccatttattgttttatttaatgaaaaatatgataaagaattacttaataaatataatgtttatgcatttattacattaaattttatatctgatgatgttgttagattagaaggtttatcaagatgtaaatttggtgttgataaagaatcaaataatgaaaaatttgcatatgatattagaattgaaatattaagtaaaagtttatcaattattttaactgaattatttgcaactcatatgagtttatataatccaatgatgcttgattatttattatttaataatggtaaagttaataataatgcaaagaatatattagatgtaacaaatgaaaaattagataaggaaaaggaaaggataatagaaaatatcaataataaagtgaaggaaaggaaaattataaatgatattaaaaatgataaaactaataaaaggaaatcagttgaattgatgaaatctgaaccaatgtctaaaccaaaggtaaagaaagtggaaagtaaagaaaagaagaaaggaattttcagtatttttaaatctccaaaatcaaaatcaaaatcaaaaactaaatctaaatccaattctaaaacacaatctaaaccaattactaaaccaagagttatcaatctgaaagatgaacctgaacgtaaatcaagtgttctttataaaaaagttagtattaaaagaaataaagaaattgattattctgcattaaagccagcaaaaccgaaagtaactaaaccaagactttcattaacaattgctgagtttactaataaatcagaagaaaaaatcaataaaaatgataataccattaagaaagaaattaaagatatgaatgataacactgatgaagctgatgttgatgtttgatgtgatgttgatgttgatgttgatgttgataatgatgtacaaaaatcaaatgcttccactagtatttatgttaattctaaatttgagttcccaatggaaccaagttcagaaactttcaataattttaaagaaccaaggtatgcaccattaaaagattcaccaagaactaaaggttataaagattcgattgatttaatgggtaaatttgaagatttaggtaattatgatgatgatttatttgaattaaacgaaaagccacaattagataaacaagttgatgaagtaaaatcgattgattcaccaactgctgaactcagcgttgttaataaaaaaataaaggatgaacaaataaagactaatcgtacaatttggcgtgatataacaaaaccaattataattgaaaaaccaccaccagctaaattattaccatcacctattaaaccatctaattctaataatatattaggatcaatttcaagatctgattcattttatataagatttagaaaattaaggaaattacaagatgaatcattacataaacgtggtatttcatatatttcagatttaagtagtttaaagaatagtgatcaaaaagcattagattctggtatgttattttcaattgatgaaacaattgatgataatgaagaaactaattgggaagtatttgatgatgaaaaggagaaaaaaaaagttaatgaaggtgggagtgttagtgggagtgttattattaatttatcatctggaaaatcatcaaatagggtattatctaaatcatctagtgtttatttatcgtctaatgaaataatgcataatgaattatttgatagtcttgaatttgaagatactataaatccatatgcaattagtgaaaaggaagttaaagttgaaattgaagataatatatttgtggatattgatccaacgattgatgaagtattagttgaggaagcatttgctaatattgatacaattccaatgtatgatgatgatgatataattaatttttcaattgatgataaaatgggtaatattgatttccaatttgatgaaattgaaatgaatttaataaatgaacttgagaatgaagatgaagttaataatagtataccaagtttaaacactgataatgataatgaagatgaaaaaattgaagatgaaaaaattaatttatcaatgttatcaattgatttaagttcatttaatatggatacaattaatgaatcaaatattaaacaatcagatacaattattggacttaatagattacttaatgataaatcatatgcatatttaaaggcaatattccgtgaatcaccaaaattattacgtgattatagttataatgcaccaattggtaaatcactttattatctatctaattatcttaatgatgaagagattactgtttaataatttattttattctattttatatacatgaaaaataatacactttaatttaataaacccccataattaacctaatcttctattatttctaagaacttttggtaaacctttaacatgacctttatcagaatcatttataatcatgaaaactctaccactttgattcattctaccagttctaccagctctatgaactaaatctgatgaatttgaaggtacatcaagtaaaataatatttctaataccattaaaatttaaacctcttgaaagtaaatcagttgtaactaaaacttttaatctattattatcattagtacttggttctggagcacttgaaaattcattaactatatctttcctaatttgaacatcatcatcacttgtaatacctttaacattatgaccaaaagttttcaatttttcaacaactccatttacatcttcctttttattaacgaaaacaacaactcttttaatgaatccctgttctgtaccatcacaatgaattgcatataatgcttgagctaaagctttaattttagatcctttataaggagcaacagatgcattaattaatctaaattcaattgattttggtaatttatgtaaatttggagttgaaattgatgtaattttcggataaatatgactaattgttttattaaattttgatggaacagttgcacttgtaaaaattaaatttgataaattattcatatttttcaaaatatgataagtttcatcaataaatgaaggatccattaaagtatctgcttcatcaactactgtaaatgaaattttagagaaaatcatacgtggtgatgaaatggatggatatttagataatgatgaaagtttaccaggtgttgtaaccattatatcaatacctttcttaaataattcaataaaatttttataatttgaatcagtatcccatttaattatattaagattaagagatggtgcaacattagaaactgtattgaaaacttgatcaacaagttcatgagttggtaataaaataactgatttaataccagcatttgaacctgaatttgaaggttcagcagttaataaagattgtaataaaggagcaagataagcccaagttttacctgaaccagtttcagcagcaatagtataaacattaaagaattctgatttattaccattaataattttaattgcagcagtttgaacaggagttggacgtataattaaaccatttaattcatttgttgatttaattttctttgttggtgaaacataattttgtgaacgtaaaacggtattatatttaatttcattaattaaagcctcacgtaattgaggtactatttttaattcattaaaatctgttattttatctaataagattattaacaccattacgagatttttcatcaggtaaatttaatgaagggtatggaccaaatttataaggtggataagcatcagcatttgatgaagtagaggaatttgaatttgtagatgatttattcaaagatggaccacgacctttaggtccactatgacgtaaaaaccttggtctagcgtagtaccttacgaacttctgcattgttttaaaagaaaagaaagtaggtacctgatatagaaactgaaaaattaaaaatttcatgttaaattttcatttatagtgagaagagctttctttatatagggggaggtattgctgagccgtatgtttattcttctaaagaccatacgatatggacgtgtttgagagacttacagcaggtgggacatcccgtcatagcacacatacaacacctaagggtaagaaatggtcagtgagggattttaagattggtaaacgacttggaagggggaaatttggtaaagtttatgttgcaatggagaaacgtagtcaatttatagttgcattgaaagttataagtcgtaaagaggtaagtgcatggaaagttgagaaacagttggttagagaggttcaagttcaaaggaaattaaaacaccccaatatattatcattgtatacatggtttatggataatgataatatttatcttgttttagaatatgcagatgggggagatttgtataataagggaccattacctgtaagtaaggttaaacccataataaggcaaataatggaaggattgaatcatttacataatgcaggagttgcacatagagatgttaaggcagagaatgttttattattgaagaatggacaagttaaagtagctgatcttggttgggcaacacatattacatcagtcaatacaagacgtacaacattatgtggtacattagattacctttcaccagagatggttagtggccaaccacatggtaaacctgttgatgtatgggcagtgggggtgttaatgtacgaattacttagtggtaaggcaccatttgaaggacatgatgcctctaccacctaccagaagatcataagaggcgtcgcatcgtccgacttcaagataccaggttcacttaatgaaagtgggagggagttcctctgccaaatgttgactcgcgatcagtggaaacgtccatctttcactgagttactgcttcatccttggttgaatagtatagagtagacaagggagagacaatgtcattagctagttcattaccaaagttatcactggatgggaaaaaagttaatttacccacctctttacctgctttaaaggaaactttagttaatcttattgaaaatgataattatcaaagggcacaattaatcattaatgcattaccacaatttgccaatgattcatcaattttaactgaagttgcatatatttattataaactcaacaatcatgaaaaattaagtgaaataactccttcaacaattgctttaaaacatatatttgcacaatattattattcaaatggtgaaaatgataaagctttacaattatataattcaattaattcatctcgtgatgcaaatgatatagctgttaatattagagcagtaatttcacaaaagttatatctttcaaataataatgttgatattagtattgattctttaccatcatctgatattccttcatatgatgaacttttcaatgatgctcttattcaaattttctcaaataatttaataaatgctcaaaatttacttgaaaaggctaaaaatttagcaattaattcagtttcaaattatcctcaacttgatgcatttattgaattagctccaattgatcttcaaattgcttatgtatatattttacaaaaaaatatttctaaaagtaatgatatattagatgatatttcatctcaattaacttcacttcttaatcaatatccaaaaaataaaaatttacaaataattaatctcattttacaaaataataaattaagcattattgataatgaatcagtagtatctccttacctcattttcagagaattaaatttcccaaattcaattgaagaaactcgtttaaaacttacaattcctcaactttcaatatttaatagaaatgaacttttattatcaaatcaaattaataaaacttctaaaaatactataaaaaaatttattgaaaataatcctaacaatattacattttcatcatcatcaccaattaataaacttttacaaaaagttcaaaattttattaataaaaataataatcaaggagcaattgcttatttagaatcttcaattgatattgttaaacaacatacttcattaattgttttattagttactttatatgaatcaattaatgcatcaaataaagttcaatcatttttatcaagtatagtatcatcatcatcatcaaatgaaattataaatgaagaattattgaaatttattcaaatgaaacttaataaagatgttaaatcaatacctattaatgaagaacatttatcatcattaatttcagatattgatgtaaattcattaaatttcccaacatttaataattcaaataatcaaaaatctaaaccaaagatcattaaaaagagaaagaatcataataagaaaccaaagaatacacattcaaagattgatcctgagagatggttaccattaaaggatagatcatattataaatctaagaataagaagaaaactcaaggtggaactgttgattcaggtttaagtatttaaaagtagttagttttatataatttctatgtaaataaagtatcttcatctctaagatattcaccaatatcaccttgacggaataatacaatattagttggttgtaaatttctagcttcaattgttgattttgctgaaattccaaatcctaaaggtgtatcattcatactataaacaattacacctgcatgttcaggtatatcttcactcattttaccaatatgtgcctttaatacatgattaccataaaggaatggcatttcaccatttgctttaatccaaattttaaattttgcaaattctgataaatattttaatgatgtaatatgtaatttaaatttaccagttttagtaaatttaccaaaacatacaccaactgacattaaattctttcttgcaactgatgttgcaaattttgcaattttttcttcaatataataaactctatccttctgtacacggaaaacatgtggatttgtttcattattaactaataatgcaatatttctaccaatataatttgcaagtttttcgaaaactacctttgtttcttcctctgtaagttgtctcattgtgtttaatgggtattttatataacgattggtatataaaaagtgtgtaaataagagattatgaaatttattttattttattatgcaatgaaaaaaaaaattttcatgttgatgataaatttggaaaattattttatgtaaagtttatgtagacatgttttttttaatttaatttcttccttttaaaactgtacaatgtcagaatcacaaactaatgagctcgttgatcaagttgatcaagtgggtactgactccaacaacaacaaagacagtaacgactatcaacaaggtaatcacagaaccccacacatcagtaaattggcaagtgaagagaaaagacaacgtttattgcaaaaagacacggacaagtgggtaagtttttccaaaattattaaccaattaaagagaatataatatactaacataataattatttatttatatatagtcgtatccttgatgaaaatggacaacctgtttataaaaatgaggaaagaaaacctaaacgtaaagttgcatgtatgattggatattgtggtacaggatatcatggaatgcaattaaatccaccaaataagacaattgaaggtgaattatttaatgcatttattaaggcaggtgcaatttcaatgaataattcaaatgatttaaagaaaaatggatttatgagagctgctagaactgataaaggagttcatgcagctggtaatgttatttcattgaaaatgattattgaagatgataaaattgttgaaaaaattaatagtgaattacctgaacaaattagagtttgggggattcaaagaactaataaagctttcgattgtagaaaattatgttcatcaagaatttatgaatatttaatgccaacttattcatttttaccaccaagacctggttcaacattatcaaaagaaattgaaaatgctaatttagaatttaaagatatttcaagaaatgatgaagaaggtaattattttggaatgatttattaatgaaatgtaaagaaatgggagttgaaaataatgaaattgaacaaatttatgaagcaaatagattaaatttagaattatcaattccattagagaatgcagcaattaattttagaaaaatttctagggaatgtagagcaaattatagaatttctaaagagagattagaattagttagaaaagcattaaatatttatgttggatcacataatttccataattttaccaatggtaaaaattataaagatccaagtgctaaaagatatatgaaaagtttccaagttagtgaaccatttttaattgaaggtactgaatggatttcaattaaaattcatggacaatcatttatgttacatcaaattcgtaaaatgattggtatggcatcattagttattagaacaggatgtccattagagagaattgaacaagcatttggtgaaactaagattaatataccaaaggcaccagcattaggattattattagaacaaccagtttatgatagttataataataaattaaaagattttggacatgatgcattaacatttgataaatataaggaagaaatggacgcttttaaacataaatttatttatgataaaatttttaaagaggaacaacaagaacatgttttctctggatttttcagttttattgatgctttcaatggtacaaatgagacaactggagttccaattttccaatttttaacagctagaggtattcatggattagataatgatattaatcatgatcaataaattacgtaaagtttatacctatttataatttaagtattttcttatcgatataactaccaaatgaagcttttattatttaaagtatgataattggaatagatctgctatgtatcgacgcgtcgactttaataataattacctaattaagaaaaatgagacgattttcaaggaaaataacggttatcacttgtcttttaatgatggttattattaaaattgcatgtttttttacttaaaagtggtgatattatttaatgatcttatgattttttaattaatggggtatgatatgaatgaagtataaaagcaagtattaagtattgattaattaatgatagaaataattattattttttttttatcatcacacaaacaaacaaacaaacactaataaatatactaatgacaaaagttggaagaattggaccaaacccatatgttgcacaacttgctaaacatgtaccaagagttggattatggtcaggattaatggttgttttctttggatggccaatgattgcaccaactactaataaagcaggtatttgggcaccataagatattaactttatgaactgtatactataacgaaatcatttattctattctaattctagataatattatataacttatttaatttaaaagaaactattcggaaatatcatactgtaataatagaacaaagaacatttccactagtgtataaagtctaaaatagtatacacactaagttaagaaaaagcttctatcgtactaaaataaaaattagtgtggtttccccacattaaatcgatgaccttggtgtatgctgagccttcacttaatttaaaattttctcttctcggccgtaagtattgtccgtaatagtgataatattactatatgtatattgattataccacctaccggtacggatacagttaacaagtatactatgtaggtagtgtatatagtataggataggataataactgaatgagagacttagtatacgtatatcaacttactattagagtttaataaactcaatcgtactcacacaggcttagcattatgccaatgattaaaacgtttcttgacagtgaaaaagagaaagataaaagataaaagagaaaaactttttcttttcaaacaattaaacactaattaaatcggttttatcatctagtggtggcttaaataatagtattaattgttatgacaacaaattatttttttttcaataagcttaaaggataagaacttttgctataaaaatgtatatcgtgatgtagtgaaaagattttctattgtcatttattggtgattatcgatgattatcagtaataagttaaaccctaacttaacaccacgaaccaattttcttcatatatcgtattcggattatttcaattaattaaattacattcatcgtattcagttaatcttataaatgaactattccttacattcatctctaatttaaaatttctaatctatcgtgtttgatcattcatttattacattacttacgttaatttatttattttgaggcggtattattttctttaatcgttgaactcaatgaatatgtgtcaccatatggttataaatacattacattatcccctttttgttaattatttttaatttattaaaccttatgaatatacatatatacattatattcattatccatatccatatttattatccaaattattgattaagtatagtacaacccttaatataacctgaatatattacggaaaaatttattaacaataagcatacgtcacagcaattgaatattaaaaaatttaaacgaattaggtgaaaatggaagcaaatttgaaaatggaagaaaataacccacttaacaaaactaataatataattggaaatagaaatgataatgatgtttctaagaataatggaaaccttactatagatacaatgccattatataaccataatactcataataataaaataatgcaatcaccagttcaagcgcttaatgaaaaggttgaaatttcaaatattgaaccaaatcaacaagttttaacaagtattcaaagaaataataatagtaataataataataatagtagtagtaatagcaacaataatggttactattcatatttaaaaaatcaatcaaataatattcaaaataataactataactataattataattacaattataactataattcacaatttcaaccaccacctccattaccaaataaattatcctttgctaaatcatcaaattcaacaatttcacaaaattcaacaacttattcaaatgaaaaaacaattgattcatcaactttttcacttaattcatatccaactacaagttcatcaaattatagtaatccaagtataaatagtaataataataataataacactagtataccttattcatcaaataaagaatattataataatccaatgttaatgattcaacaacaacaaaatcattatgaacaatttaataataattcaactcaatcaatttattattatcaatctaataataacaatccaaatttaacttcacctccacctccacctccacctccatctttacaatatccacaacaacaacaacagcagcaacaatattataaaactcctaatttagtattaccaactcaaatatactattcaacacaatcagtaaattcaaatccattaccacctttacctaatggatttataaaatcaaataataataaattaccaattaaattagatgaaacttataaaactaaaactgctgtaccttggaatttaaaggatagtatattattaatgaaattaagggaagatggattaacttggaaagaaatttctaaaaaatttaaagataggacattaaatgcatgtcaatttagatggaaaagagttatgattaatggaggaattgatgcattaattaatgctgaaaggaaatatggtgatttagaggatgcagttaaagaaggtgttcatagattacataataaattagaatctgagagtgaaggtattgaaaaaaataatgatattgaagatccaaatattatacatggtaggaaaagaagtcgatctgaagaagatgaagatgatgatagggaaatagataatgatacggaaataggtaatgataatgatagtaataatgatgataatgtacataagaaaatcaatcagggttaaaaggataagagagtaacaaatagagtcatttatttctgtttgtaaagtttatagaacgcatttgtatttatatatagattcttgtattataaatgataaaagaaaatagaataaagatcataatattaatacttcctaaataggaaggtctaataaaagaaatctgatgatgcgaatcaaatttttaaactaactgaggttgtcttattccaatcttaaggctcattcttttttcttttgtaaagtagagctattatacaatgctaggactagttattgcaccattggcaatagcttcattgtttggatacattgtattgaaaactgaacctacttggtttagaaaatttaataataaatatagaattaaggaagatttacaattagttggtatacttggtagtttctttcatcattatgttattcaatcattaattactaaacaattctcattatggtatgaatttgaatcaaatgcaactaatccaaatgttatgaatacaattgcaattaaatatccgaaaagtattagtggtaaaaattttaaaattgatggtgaaaattcatttattgttgaaaatattacttataaagaattttatgaatcaattttacgtatgtcatatattttaaaaaatgaatttggtattgaaaaaggtgatgttgtttcattatattttatgaataaaccattatttttaataatttggttttcattatggaatttaggtgcaatacctgcatttttaaattataatttaacttcaaatcctttagttcattgtattaaagttgttaaatctaaagttgtacttattgatgatgaatgtttaaataattttaataaaacaaagcaacaaattgaaaatgaattaccaaatgttttattaaaaattattaatgaagagaatatgttagaaaaagttaataataaaattaatgaacaatttcgtgaaattgattcaattagagatttaaatgttaaatattgggatccagcagttttagttttcacttcaggtacaactggattaccaaaatctgcagttaattcatggagaaaaatttatatggcaactcatgttttccccaaagcaatgcatttttcatcaatttcaaatatttatactgcaatgccattatatcatggtactgcatcaattttaggtgttttacctgcattaattgttaaaggtacaatttcaattggtcataaattttcattatcaagttattggacacaaattaaaatttgtaaatgtaatacaattcaatatgttggagaagtttgtagatatttagttgattctaatgaaacattaaacgagaaagaatgttatggtaaaattcaattagcttatggtaatggattaagacctgatatttggatgaaattaaaggaaagatttggtattaaagcaattggagaattttattcatcaagtgaagcaccatttgcaactacatgttatgaatataatggtattggaattggtgcaattagaaataatggttatttagctgataaaatattatcattacaatataaattagttaaaatggatccaaatgatgaaacaattatttatagaaatccaaatactggattatgtgaaaactccaggtattaatgaaaagggtgaaatgattatgagaattttaaatcctaaaaatattaaggcaacattcccaggttatgttaatgatgatattgcaacatattctaaaattattagagatgttttcaaaaagggtgatgcatgggttagaagtgatgatttaatgagaattgatgaattaggttgtatttattttgttgatagaatgggtgatacatatagatggaaatcagagaatgttagtacaactgaagttgaaaatcaaattttagaatttaataaagaaattaaaaattgtgtaattgttggtgcaaaagttgataatcatgaaggtagagcaggatatgcattaattcaaacacaaaatgataataaagatattgaaaataatttaaataaattaaatgaaatacttaaagaattatatgaaactagtattaaacatttaccacattttgcaagacctgtatttgttacatttcaaaatatttcattctctgatagtcataaaattagtaaaaaaattttccgtgatccaattttaccatgtggtaagaatggtttactgaaaggtttattatttagatggatcaaagaaaacttattcaccacttgatgataatatttatgctagaataacaaatggtgatattagattgtaataataatgataataataatgataatgataacattgtccctccggtaccggaggtgagaactaaaaaagcaaaacagttaaaaaacctaataacaataaaaataaatgtccaaatctattccggaaaaaccagtgaaaaaaaaatgagaaaaatcagtcatcatcatcatgttattactattgtccaatcaataactttgatttataatttataagccttcttttcagaatagaacatacctttaaactacttattctctctctctattttaattcatacactacatgactgtaagtaataccattataacagtaaaagtgaaataaaaataaaaagtgaaaaaactccgaaaattttcgccaattttctttcaccatttgaaaattttcaaatgactgatttttcaaccacatagtttctttattgggggaattctacttgtttgtattatattattcttatctttatttttatttagaatatctttactaacacatccttatagcaaccatcaagaatgttcattcaaaatcctaatgtcggtaacagaaataaacctgaagattggagaatttcaggttataatccattaactccacctgatttattacaaagtgaaattccattaaaggaaattaatgaaaaagttattataaatggtcgtaatcaagctgttgatattttacaaggtaaagatgatcgtcttttaattgttattggaccttgttcaattcatgatccaaaagctgcattagattattgtaatagattaagtgaattaaatgaaaaattaaagggtgaattacatattgttatgagagcttatttagagaaaccaagaacaactgttggttggaaaggtttaattaatgatcctgatattgatggttcatttaatattaataaaggtttaagaatttcaagagaattatttgttaaattaactgaaaaattaccaattgcaagtgaaatgttagatacaatttcaccacaatttttaagtgatttattctctgttggtgcaattggtgctagaacaactgaatctcaattacatagagaattagcttcaggtttatcattccctgttggttttaaaaatggtactgatggtacattaggtgttgcaattgatgcaatgagagctgcatctcatcctcatcatttcctttcagttactaaacctggtgttgttgcaattgttggtactgaaggtaatgaagattgttttgttattttaagaggtggtaaaaaaggtactaattatgatgaaaattcagttaatgaagctcaaaatgctttaattaaggcaaatataattaaagaaggtgaatcaagaattatggttgattgttctcatggtaattcacaaaaaaatcataaaaatcaaccaaaagtttcagctgaagttgcaagacaaattgcttcaggttctaataaaatttgtggtttaatgattgaatcaaatattgttgaaggtagacaagatgttcctccattagatcaaggtggtaaagatgctcttaaatatggttgttcaattactgatgcttgtatttcttgggatgataccgttgctgttcttactgaattagcagatgctgttaaaactagaagaagtttaaagaactaagttatggttctttttattaaatcttttctatttagctttatctttcttttcatccccttccccctatctaaatgattcttacatatatctatttttattgtacatacatattccagttgctattattttatagtatttttttttatataaagaacaaaaaaaatatttcatttctagaataatattttaaataactgtttcgtttactgtaaacataaaatatacaagaataaataattataaataaatatgcatttcatcatcattatcatcattataacatcttagttataatattagttagcaagtttaacaccaatactaactttccttttaccttcagtaaaatcctttaattcaacttcatttgtatgatttaataaattatcaatttcttccttcattttattctttaattcttcatctttagtaataattaatgcattagattctaaatctaatccatatgcacgtttagtataattagaactaccaattactgttaaacttggttgttcctcatttggtaaattaatccaaataccttttgcatgatatgaccaaccatttggtgtattaactataccattttgccattctaataatttaatacgttcattaatattttcacctgattgtttaccctttttagataattcctctaaaaataattgacaattataaacatatgcatcaggtaaataataacttataccatttgatttataaaatgaatttgattcaggtgatgcagttataatattaccaattgcttgacaattaattattttctttttaatttgtgaatgaacattaaaataacctgcagttatagtaaatttagtatttttattatctaataatgataatgatctaagaatactttgtaattcagttgattgatctggattaattaatggagtaaatgaagaaattggataaacaattgtaactggatctttctgtgatgatgatgaattttcaatttcatgatcattatcaatttcaccatcaaattgatcaattggttcacgtttcagtatctttaaattttgattttaaaacaggtattaaaactcttgttgcatcactaataaatcttgataaatttaaatttggttgagatgctaaattagatgttggccaatcaagataaaaaccttctttacgatttttacttgaaacaatttgataacttaatgaacttatagcattttgaattctatgataataatttgttaaatcttttgatttaaataaataatatctatcttgtctatttgtaaaataatcttgtgataaatttgcacctgataaaataacttcattatcaataccataaattttcatatgttgtaaaccataaatttcatttaatcttttaggtgttaataattctttaaaaccatgtaaatgaggtgtatgatataatctaagattaactctatgtttaccaaatttttcaactaatggtaaaattaatgatgcagttgatgctatctggtacatcccttgttgatcttaaacaatctaataatatatcaacttttaaatttggtttattttgcatttgattaattataatttcaattaaatcattttgatttttaccaatatataatgatgataaaaatattctattttcagcttttgatatcttttcttttaataatttataaaataattcaggatgtgtaattatatcaatttcacccttggctaattcaaatcttggtgcaattgaatcaagttgttgaattgtaccacgtattaccggattccatgttaaataattatttaatggaggattatcaactttaattgttgaaaaatgatgtttagctgtcttgaaaacgcatgccattcgatgaatctgtgagttcaaggctggtaacatctttaattatagtatatattgatccttgtaaaataaacagaatgaaataactttatgtaaaagaagatcaaaacttttgaaaaaattaaataattttccaattttccaattttccaaatttcatgaaagtatatgtataggaaggttatttcttctttttaatattattatagactaaaattcattaatttgaatgtataagagagtttctacaattgtgaaacgattattcaatacaatggaggaaactaaccaattaaatacatcaaataacgatataaaacctattaaaaaacgtggtgcaattgcattagttgatgaaaatggttttaaagtacgtaaagttcaacaagttgcaaataagaaacttagtaatgaaattaatgataaaactatcaaggaagaggatgaagatactaattatataattgatggatcattacgtcgaacaacaccatatttttatacttatatgacatattgtaaattaagatggagagatagatcattattagatattttctctaatgaatttagattatatcctgaaagttattatattaaagcattagaaaatggtacagttacattaaatggtgaaaaaactacaaaggatacaattatacataatggtgatttaatttgtcatcgtattcatagacatgaaccacctgttagttctaaacctattaaaattatttatcaagatgataaaattgttgtaattgataaaccaagtggaatacctgttcatccaactggtagatatagacataattctattacttatattttaaagaaagaatttaatttaaatgttcatccatgtaatagattagatagattaacaagtggtttaatgtttttaggtaaaactgctaaagcagcagaggaaatggttaaacaaattaagaatagagaagttagtaaacaatatattgcaaaagttgttggtgaattcccaattggtaatataattattgataaatcaattataacttatgatccaagagtttcattaaatattgttgatgaaaaaaatggtaaagaagcaaaaactgaatttaaaagaattagttatgatggtgaacattcaattgttttatgtaaaccatttactggacgtacacatcaaattagagttcatttacaatatttaggatatccaattattaatgatccaatttattcatcacctgatatttggggtgaaaaattaggtaaaactggagattttgataaggataaagttgttaatatattagaacaagttggtaaaacaagatcaacatcaagttggttacatagaaataataatattttaaaatctggtgaattattaaatggtgaaaaatgtgaaatttgtcaacaagatttatatactgatcctgatccaaatgatttaaatttatatttacatgcatataaatatgaatcaaagtcgaaggataataataataatggaaattcatggtcatatacaactgaattacctgaatgggcggaggaacatgcaacaaaatatatgaaattagcaattgaagaagctaaaaagagtgaaccaacatcaactgcattttgtgttggtgcattattagttaatagtggtaaaatattatcaactggatattcaagggaattacctggtaatacacatgcagaacaatgtgcattagataaatattttaaagataataatacaaataaagtaccaattggaacagaactttatacaactatggaaccatgtagttatagattaagtggtaatgaaccatgtttagataggataattaaacaaggtgggaatatatcaagtgttttcgttggagttttagaaccttcaacatttgttaagaataatgtaagttatgataaattaactgaatgtagtataaattatattaaagttgatggatttgaagaagaagcagttaaaattgcatctaagggacattaaaatgtgaatattatactatattatactatactttacctttttgaacacgacttaatctttcaatatcatcatcaagtatccaccaagcaggccaaaatgattttatattattttttaaaatatgagttaattgaggatttctaacagtattatcacaaccaccaattgatgaataacctaaatcatataatggacaataattaattttaaaattagaattaattgattttctttctaaccatttaataaaataccaaacatcacctgtatgccaatctaatattggatgaattcttaaaaaatctggccatcctctatgagtatcagttttctgttttaataataaatttgaaccatatggatctgttcgacgtataccaactataattgccttaatttgattattagttgattttaaataagttgaaaatccacaaggtaatgttgaagattgtgagaataaacatttaatattacctgatgatggtgtttctatttcatctaatatttgagatttatttaaatgatttatttcattgaataatgtataaacagctgtaaaatttaatccaaattgtaaaactgattctttaaggaaattaatttgttcatcaaattcagtttctgtatgtacatagacagcatttattataagtggtgatgatggattaaaattattgttgtctattattttatttttataaacagcagcaaaatagattattaattgtacaagacaatctttaccaccattataggaaatacttaattcctctaaatgatgattttctaagatattgataaaatcgttatatgtttgtaaaactaatttttgagtttgtaaatgaagttctttattaaatgaagatgggtataatgttggtaaatgtaaatgtttatctaatttataaattttatcattttcatctaaattaattgaatttaaacaattttctggtgtggaattaagaaatgattgtattaataaataacaagccttagtggcctctaaagttgttgtcattatgtgtttaatagaggttattttatgtgaaaagaaaagaaaataggtgaaaagttgataaattccggaggttgaaaaaagatttgaaatttcaattttcaattttcgggagatcttttaatggctatttaatattaaattggaagttgtatttacaagtatataagttattaatactatatatcaatatcaaggtaagaaagcatttttagttctataaatagtttcaacttgtcttgtttcaatattcattttctgtattgcaataactttcttatcctttgcattaccaatagtttcattagtttcaggtaatgttggttttaaaaatcttctctttaatttaatttgttcctttaatgaaaatgcaacactatttataattgataatgcaagttctttagtttttttattaattggtttagtaatatctggaattaatttttctaattctgcaaatgattttgtctttaatgaagataattcatcaattgttaaatttttagttaatgaaaaatcaggtgcaaacataatttctgaatcaattttagatgcaaattccttgtaattagtagatttaatatttaattcatcaatagaaatttcattacgtttatttgataattttaaatcataaatataataataagttgtactaaatctagcatcatcaattgatttaccaccacgtaaataaccatcaattgataataatctatttgcagctaaatcaagttgttcttctgttaaagatgataaatttggaaagttctttttaatttcatttttaaaattattaaatttaatatttctcttttcaattcttttatttaattcttcattaattttaggttgtaaaattttcacatttcttggtaaatattgagcttcaaattctgcccttttaccatctaatacatctctacctaatctcctcttagttggttcaaaatgtggataaggtaatttatcatctttatttaatgcaataccaataaattttctctttggatggaaaggatctaaataatatttaacaaacccaggttgtaatgcaaataatgtatgatctttaccaataccaacattaatacctggataccatttagtacctctttgacgatataaaatttgaccaattttaacttgatgattttcatattttttagcacctaaccttttaccaggtgaatcttgcatatgagtctttgatgagacaactttcttatgagcagatctaatttgacatttgatgaaactcaccaaggaattcttagtggtggttattgaatataacatccttactctacagaagaactatacattaaaagaagaacttcatgaaaatggaaagaaaactcatgaaaaaatggaaaattggaaatttacacatagtcgatacgtctacttatttaggccatggtaatacaaatactctatcaacgggtgttaacttatcaacctcttcttcaccttcaaatcttaacatacatcgattgtttctgctctctagtacctctgcaggatagaatgttgtagtctccggatatttagcaagtactttactaccaattttatattctttaagtttactattaagtaaatgtaatggtacaagtataacttctttataatttgccttaaaaatttgtccatttggatgtaattcatcaggttcaggatcttgaatttcaaatcttgtttcactaattatttttaaaactctacataaaatccattcattttgaattccattaaatctacctgaatctgaatttttacttggacaatatgcaacttgtgaatttggtaaaattggtgttgatggattaaatattgatgaataaaatgatctaccaattttaccattatatgatgataatggtggtggacttggatatccatatttttttgctgctgtaatgtttttattattatcttctgatggtggtggtggtgtaggattagatactggtgaatctaattcagattctgattcaagtttaatcttctttaatggtggttgaatttcttcatttttattacttttacctccaagttttaatttaaatgatccatgtggtcgtcctctacctctaatcatattattacttatactctctattttaacattattatcaaaatcttgtccattatttgtttcagtaattataacttcttcattatctttatctttatctttactttctatttctttatcaatttctttttcttccttaattatctctgatgtagtttcaacttctattggttcctctttattttctgtattttcaggtatttctgtattaattacctcttcctcttccttctcactgtcatcaatactttcatcccctaacaattcattccttttattaattaaaactctaacttcatcagataataataaattattatcctctaaattatcactatttgataaattatattccatttcatttataattgaactaattttctttgttgcatctaataatttacttaattcaatattctctaatttactcacatcatctactccaagtatattcaatacttcttgtacattatcccttattaccatctccatagtctaaaagaagacatataatttcgcataacagttttaaaattacataatataatataataaattttcatacacattttaatacattaactaactaatgaactaatactcatcttcatctttaattcaccttcattagcttcaggttcagatttattaccttcttcttcttcttctctctctccatctacctctccctcaatatctccctttggtccctcttctttatccccatttaattcaattttagaattacttatattaaaaccttccttaaaaatatctttccttaattcttcatcaatactatgactactatttgtaaccataattgcaggtggtagggtagttccaatactgctattattatttccattattattattagaaacagaatattgacttaaacttgtaatactcaatctaccacctaaactaccttttctactattattattaacaaatcctaaactactccttcttaaaactgaattaatattatttgtaatactaccaacactactaccattggtaccattattattattacttggtattgcccatattgaacctctacgacttaaactactatctctatcaccattagttgaattatctaatagttcattactacaaattgatgaatttcttgaacttctacctctaactcttggtgaacttgttaatgattcaatatgtgaactatttggtggactcataatagaattgttaatattattattattattattatttattgatgttaatgatgttataccattaagatatggtgattgtaaaattgatgtaaaattatttgaattattagaattatttgatccaattgatccaattgatgcagctgaatgtcttctcttggaaattgaatcttcctttatctttcttttcctaatatattcatttgattcataatcaccattatttattgaaagtaaactatttgcagctcctaatccacttaatgattttaatccatttgatgatgatgataatggtggtgatgataaattaatttgattatttgttgttattggtggtaatttataatcatttgatgatgatcttgaatgtgttttattagtgtcattttcattattattatcatcattattatcattatttttatttgtctttaatttattatcatttttatcatttaatcttttccttctatttgcaccaccattccaccaatttttaattgcattatcacttctaccatttaaatgacgtgcaatttctgcccatcgtttaccatatttttcaactaattcttcaattaatttaccttcatcaggagtaattggagttctatttaatgaaggttttaaattttgatgatacctttctcttgcttgtttagctgttctactttctaataattgactaattttaacccaatttaaattattttcacctccaaacaatgaaactaattctaataaatgtttatcctcttctgttgaccatggacctcgacgtaattttgttaaattggtattagtgttggtattattattattattgaattcagatgatggtggtattgaaggatctaatttattatctgatggataataaataggattggaattagaattaggattaggattaggattttgttgttgataataaacagggaatccaattggtggataattttgataccccatttgttgagcttgtacatgcattctagcttgtaattgtgcctgtgcttggtattgagcatgcgcctgcgcttgtgctgcttgtgcttgtgcttgtgcttgtgcttgtgctgcttgttgttgagataattgaattggataattaattcccatattcatattcatattcatattattcatattattaatattattcatattattcatattaatattattcatattaatattactcatattattcatattaatcaatttcgagtgttccttattattagaatccataccagaatacacagaagaagaacagaagagaagagatgccatacaatagcaacaaattaacaaggtgattgcataaaattgagaaaacgaggaaaaaaaccggtattttttactttatatagagatctttaaagattttatatagattttatacatttattgcttattccaagagagtaaattggtatcacctgcctttctacctttaataagtactgtaattattgtagtaattgtaaatactaaacaaattataccaccaattaaccaagcaatacctaaaaatgaatttttaccaccaattgaacttgaagttgtaaggtaaataaatttaccaccattatattcagttgttgggaaatgtaatccaatattaatttgataaatcccttgagttaattcatcattatcatttcttaaaacaagattagaaaaatcacttaatgcagcaggtgccatccaattttgaaattgtgaccatgtactaatatcaggtacatttgtttcattataaccattagggaacattttaatccaatttggtggtggtacaatatctctataatcatattgagttttcttaaatctatttttattagttgaccatgcaatattatcttctgataattgataattattagtttgagaattattaactgataataaagttgattggaaagtatcattaaataaagaatttgcaattaaaccacatggataaattattttaccattatcatcaattgataaaggttgacaattttgtccaattgtatccttaattgtacttatacttgcaattttaccattaatttgatcttcactaaatgatttaacatattgtctatgatttgcatggaaattagttaatttataataaattaaaattgaattttttaaattatttggaatttcaaattgaatttgacaaatatttctctcctctgggtagttggaccatatgtcactattatttgttgataatttccattttggattaattgtaatatcagatttaaaattatattgataataatctaatggtatatcagaccaattattatcatttgccaataattgacaatgtgaataatcaatcataaaatcttcaattttattacttgtatgtaacattgatgcaccaattggtatgaaaataattgataaacaaaggaataatggtacaattgccttagctgtaagaattggatgaattgcatttaatttttgttgtgtaaatgcagtttcctttggtcttctagttttcaatttctttttatttaatttattatcatcatcaaattcatcatcatcttccattaaatcttgacggtcgttattgttggtatctgaattactattttgatgacgtttagttaatccaccaaatatattatgcatattattctgtaaattagtaaccccctgtgagaaattcgacatattgatggttactcaaggaagatatatgtattataaaccatataaaaaggtatataacataacataatagaaatagaaatagaaataggaaataaagggacgatgcgtcgggttaagattatatacatgaagtttagctatactatacttatttaacaattataacaggattttcattgaataactggtatgaactctttaattgggcattgttctttaatgtttcaacatcatttaggaatggtgtccatctattaacgatttccattaatttaacatctttactaatttcacttgcatcctttaatgcactaataattgaatatgcatgatcatattgtaaaaattcagtatttgatttaactgtataaactttatcctttgttaaattatctaaattattaacagagatggaattattagataattcatttgaataaattgaggcaataattgatgatgcattaaataaaattgattgatttttatctaattttgatttatttatccaataatttaatttatcattaaatttagtaaaattaatttcattatttaatgggtaattatttttaataatcattgattgaataaatgctaaagcttcagtatttttaacactccaaattgaatcattttcattaatttgatctaaccaaattaatgtatctttatataatttataatctaattggaaacatttatataaatattgattaattatacttggttcaagatattttgacttattcttactcttattattattactaactctaattttaaataattcatcaagtgaaatttttaaattattaatttcatcagttgattttaataatgaaataaattttgttaatttctttttagatgggataccaggatattctcttggtgttattggatgattttttttatcaactgcattaagtgaagttaaataatcagaatttttcttacgataaacatatggtgtccaagttgatgataaatttttaaaataaataaattcatcaacttgtttcttaaaagaatagagagatgatgaggaacttgatgatgatgatgtaaaactacgtatagatgatggtttaaacattgtcttgtctaaaagaagtgttcattaagatatacattacttcgttgaaaatatttcctatataatatttaattctcactatataaaaattacttcactatatacagtcttatcgacttattctattgatccttcttactcttttcctttctttccttaaggaattgtctatatttttcaattgtaatttccttttgctttgccttatattcatcaattccatgatatgtagtattatttaatttatcccaaaatataaagaatggttgactaaaattatatttaattccaaacatttgatgatgaatatcatgataaattgaattatttgggaaaattaattgaaataaatcccaaggtaatgaataaccacaatgatcatcaactgttttcaatgttgaaaatgtataaaggaaaatattttccctttccgttaatcctaatgaaattgatgcaatacctgtacctaaagtatcaagtaaaaaaccttcaactggattattaaataatgcaccaaatgcataaggtacatataattgatgatgacgtgaatggaaatgtttatataaaaatttatttttatgcattaatttatgtaaataatattgccaagtatcaattataacaaaggcaatgaaaatttttaaaattgaaattccataccaatataccaaataaattatttctgttggaattaatgaatatttttgtttaaatttccataataaattattttcataacctgattgagaatgagtttcaaaatttgaaacaattaaaccagtaattgattgaattatatgttgaaaaataacatctctaataacttcaaattgtgttactttattcttagataattgttcctcactggggtgaattctatatttttctaataattgataaatatcaattaaatggaaataaattgaatataaccaataagctaaaactggtgcaattaatgataaatttgaatctgaaataaagggtagtaaacttgatttcggggtaatgttaattattggttctttgattccatttattagattgatatctgtattattgatgatgttcattgtgatactgaaagaaaggagtgtatgaaaagattaaaagaagttatgtaaaagtaacatgatttataattataatctgttatacgatcgtataaataataaaaaagaaaagacccatcgacgcatcgtctctaataaatagacgcgtcgaccttttttttcaatttcttaaaatttcttaaattttttcaatagtcgtccatttaaagaggtacagtatagtatagtgaagtatagtatagtgaagtatagtatagtattctctttgggcaatggcaactaaatttagaaatagcttttggcttaaatcaaataactttgcacctcaagtttaccttttccgtaatattgaatcaggtcaagtaatttatagtcaaacacctcatattactaaatatcaaattaatcaacaatttttccgtccaaatagggaaaataagaaacctttaccacgtcatgatatttggagacctttagcagttgcacaatttaataattattttaattcaattaaagcttatcatgcattagttgaattaaaatatttacgtcaagttaaattaaaggataaatcacaaaatttaagaaaattaaatgaatttaataaaatttggtgttcaggtcaatatagaccaacttatacaatggaatcaactgctgatttaagtactgtaattgatgaattaaaattatttgataattgtaaaatttattgggatggtctttggtggagaggtgatttaaaatattggaataataaaattgaacatattgatatggaaagatttggtagaagggaaaaatttgttattttagatgaaattagagttaaaggtttattagattatcaaaaaagtaatgatagtgatagtaatgaaattaatcaaattaatcaaataaattcctctactcaacaaatacaacagtagttatatcctactattacattcatgtatataatctagtatatataatatatcgatatctaacgttacaatcaaatagataagtactatgataagtcatattattatgtctcgcattacgtaatcagaattttatttactaacatgattttcaattataatcaattaattgatcatcaattcaatcatatttcttttcccctaaccaattaacaacaacaatggactgatttaactccaattattaaatccacctgatatggtatgtatcatataagttataataaatcttaacaatactaacactataaaggatgatgaacaaaaacaaataatttcagaaattgttttaaattcttttaaagaatttaaatcaaaaccttcacaattatcttctgatattaaattaaaattagatgaaaaattaggttctccttggcatataattgttggtaaatctttctcttcaagtatatcacatgaaaaaaatgggtttatttatatttatttagaaaatttagcaattttatgttttaaaactgcttagtataatttatatagaaaaattatttaattcaagttttttaccaattttattaccttgatcaatttcttcaatcttttcacgtaattctttattctcattccttaattcattacattcattattaactatactattttgaattattaatttttgatattttttatcaagtaataataccttattatcagtttttggaccctttttccttttcttaaatacattatttaattgtttattatgtttcctctcaattttatcaattatttcaatcatattaatataattttcaattgttttctttaaattataaattttttcaaattctttaaatttttcaatctcttcagtcttacttttattatattcaatataatatcgtattatttcattatcattattataattttcttcaaatggataattcataggttttgtaattattttctcattttcttcaattatttcagtagcatctgattcaattgaatcttcttcttcttcttcttcttccttttgattattactaatgaaaaaaaaattgggtattttcctaattaattccattttgttgtagaaagaagggatttttatttaaatcaatacatttcataaatttaaaaaaaataaatgataataatgataacaatcaaaaaaaatatatttagttccgataccgggagtcgaacccgggtctgcccggtgaaagcggaccgtgatagccgttacactatatcggataattgttatgttactaacctctatgtttggtttgtttataaccgtatatgtcacgtgatttgtcggtttcagtattaacaaagaaagaaacttaaatggtaaatataataatcaaaataaattatgtttttcaacaaataatgctacaaaaacaaaaagaattattctgaatttagaatcacaccaagatttataaaagatacatatttgttattctaatatgaaaaatttagttcatattaaatctaaatttgatgaaaaaagttaaataataatctattagaatctgttgtgattgtaatctgttgtgatctaacgactctttgggcaaaatccatattttacaacaacaacagtattaaaagaacaaactatataatatataacaacataaaagagatactaacaaaccttggaattcttcgtggtacttatactaagaattccaacgttgactaataatttcttttctgatttgcgagcaatactgaattttgattggttcttcgaggttcaacttaataatacaatatcataatttattattcagtctcactcagaattaccaatctcaacaatctcaacactaacgactctttgggcagaatccatattttacaacaacaacagtattaaaagaacaaactaagtaaactataaaataacttagattatacaaaatatcaacagactcgttattgaacttgggaattctttgttctacttatacttagaattccaacgttaagtatcgtttctttttctaatttttcatttcacttgcgttacttttctgcttcataacactaatgctctcgtttctttttctgatttatttttctgatttgcgagcaattcttaaatctattcagttttcaaggctcaacttaataatgcaatattattatgtattattcagtcttgcttagaattaccaatctcagcaccctgccatgctcacaaatcaattgcttcttcgccataccagccgttccaaccatttcattgaatttaaccccattaaaactttttgttaacatgccagcaatcatataattagtattaataaatttattcttgacttcattgttttgagtatggttggtgtctaatgtttatgtgcttgttctttgacgatgaaccgaatgttcagacaacaattcgcaacctccattatcttcatatattgttgaagctgtatttccttttaaacctactccatccaacaattgtctgatcattaatacttccttagctgcaattctcaatgccatatattcagcttcagttgaaaacaaagcggcagtttgttgtttcttacatttcagtgtggtaatttatttacctatcttaaacatgtaaccagccgttgattttctatcaactttgtcaccaccccaatcggcatcacaataacctactaaatcaaaatcagtactttcatttaacatcaagcctagtttggttgtacgtttaatgtatcctaatgtatgtttagatgcagccaaatgtttagtatagggatttttgataaatcttgataaatataaagcagcaaatccatgctgtgaaatactacaacgtcagattctgaaagtttcaaaccatagagacttttacgaagacgacatacaatattttctgaagcattgacgccacctggaaccatcataatttcttttgcaagatcaccattgagcaaagctgatccatttgatgtaccaccaacttgaattgtgcgcaatagtaaataagattttaatacttgagctactactcgtgctttaaaagttggtggattagtgttatctttgattttgaaaactcaacgacattcaattgttctttcacatgaagacagttcagtcatctttcatgtatgattttctttatgtgcccctaactccttttcaatggcaactttccaaaatttagcatcaggtgagattatggcctgctttattgtagggattgaatttatagccggtgctatggaagtatcccatcgatatgaccaagatcaacctctgtttgatcaaaaccttgtcccgaaacctttgaaggggcagtagatggaacagcatttttatttaaagtattaaccacggtaccattaaccaaattattggatgagacaccagaagaaacatcattaggaatttcaattgaatctcataactcttaggcccacaatatgtaccatctaatatgataatgaatcctccttaactgctgtgggctgatattggggagtactatgatttgatattgttgcattgataaattcttcattgctagtgattttggtatttaacttaatacttttctgaaaagcttgtttagtttttttcttactcttttctagtttttgtttaacagcttgtctcagagccttttcttgttcagtaggtggaaaaattattgatggagcaatttttttgactctaatggttccgtttcttgcatgttgtaatgtctcgaaggttctcattcttagcttcgagtgttggtgtagctttagttatatatgctgacgcacctttaattggaacaccagttgcacatgcaaaagcaggagctgtacaatttctagcaaaatgacttgggagttgacatcttaaatatgtaacttcatctagattccttttacttacgttttagttaagtttggattaaacgaagcattgactaaaattaaaggttttttaaaaaaggagatcaaaacaactttaagccagcacatacgaagaaggtaaaaatcatcattaaaaataaaacttcacataatttgtcgtgtgcatatcaatttaaactgggctttgtacctgaatgcgctggctataaaaaataaaaaatttgaaacacttgctgattttgctgagaatgtaggtaaactcgctaagggacgcggaaaataaagtcaaaaacaagctaatgaagtagtagcaattttattctttaaatttaaaccctgcccactgaacatggcaccgccaaaacgtttatctcatgcaaaaatttggtgtacaaaatgtggtacaacccatcctaaaaactaacgcttatgggattcggttactggcgaaccaactaaaaccagcattaaacgctatagatacagtgatcttggaaaagaaaaaccgtaattaacaacgcgtggttctatcagatatttatttaaattactatgtaattttatgataataagcgctcctttgcaaacaaaactcacccagactaatgttattagactcagaggcaagtataagtattgttaataatttagatagaacatttaattacaaagatggcaaaattccattaatgcttccttgaaacctgttgagatggttaaactaacctgttaaactaacctcaattaaaatgcctcagagactgatttttattactatataagggaacatgtatttccacttttattatttgtattccccctcttcttttctttatgttatttacttttgtgtatcttatttaaattacaatacaaactatattttaacttactgattaaactggattttacaaataggataaccttaaattaacaaacccaagtgacccatgcccaaagcataactaataccaaaattctggtgcacattattgaaggcttatatgtgccaacaacaatgaccgatattatcggtacaaaacagcttaataaaggtggatttattacaactgatattcttaattaccagtttatgacttctcattttaccctattggttgtaactaaattagagaaacaaatttatgaaattattttcatattcaacaagaaacacaaacacccaccaattctgattactgagcaaaaggattagaaatagactaacgtatactaatttttcattaattgatcaaacaaataaaataattgatcttacttcagacaatgaacaacgagttaaagtatcaatttggcttgcagaaatttgaaacatattacaacaagctgggtatttagtaggacccgaagatgcggcattaattcatgaatgggcccaaatgatacagtaaaattttgctgtattatattgatgatgactttggttgccattgaacaacatttattgtaacaaataaaatggaatagtattaatagtttactttcttatcatttatttagaattgaaagaatttctgatcggattacaactgacaaaggaagtgaattttgttagacttgttacttctgcgaatatgacaaatacgtaataatctaataataagatctactaaaggatgatttctctatatctatataagaatctatataagaagaactacataactattagttcttcccacatattatatcctgtgggaagttgccctcttatacatatctcatgtaacgagttgccccgttacctatattatgatattattactatcaatatatcattacattacgtaatatatcttacgtaattatattctatatttatatcattcctgacaaatttacaaaactgaaacagggaatttttacatttaatctttttgaggtcacaattagatataattgataaatctttagctcttgcaccagttggggataataaacaattgacctaagttgcagaaagaacattcaaacacttaaacaattacaaagagtatcaacagcttcatttaagtattaattgagcatacaacaactatgatagcaaaatataaaggtgacactgaaagggaaaatatctttcagtttagcctttaaaagtgtttattgatattcagcatactttaccagaacttacaatgatcttaaaaggtgatttttatggaattacaaactcagataatttatttactgtagttccatatttgcttttgggtattggtgctcataataaaacttacgttggcctatcaaacggcacacaagatattgcattaaaatttaccagacggagtacttttagtacttgcactagaatcaatagtaaattcaaaaaaagaacaacaatactttaactacacctattcagttccaacctaattcaaagaaactacatcaaattctgaaagcctcagaaacaataccaactagttttaaactagctaataagcttttggaatagaaaacagcaattaaattagaggttgcagaacatgaagtgtccacaccattaattcaatcaagtagcaaaattccatacaaagttatatggtttccagggtttacaaggaagagaaacacaaacaagtaaagcttaataggtctaaatatggtttaaaaagatcaccattaaaatttcataaaacattggattcagcatttcaaaaattttagcaatgccacgcctatattttaatagtgacaaatcatttattttagcacagtatgtcaatgacttaatagcactgaagatacaagtaaatttggaaaatatgtaagaaagaaatttaaaataaaaactaatgaagatccagaattttatttaggtgataatgttacacaatcatctgacatacctaccgtaggtttggccgctcatctagaatcaacagttgacagcttaccggaagcattacaaacatatatcaaagtaggttctaagtcagtacagattgattattagaatagtcctttattacaacctattacatctaatggttttgcatagatggcatccaatgtcattttgccaggtttatcaaagtgcctgctagatactggttcaaatactcatatatgtgtttggaaagaccaatttaaaaattttaaaacaattagtggtaaggcttatggcattattgaagaagctttagatgtgaagaatattggaagggttaaattaattcacctaaatactggtcttgaaaacacactacataatgttcattatgttgcagatgctacgcaaaatctttttccaatcaaaaaggcatccaaaactggtatatttcattttaatcagcatgggtctgctggtcagttgcaagttggcttagggttctccatatttttctggtggcttagcaagtataaatgttgtaaatggtgaatcaaggcatgctgactcttgtgtctcagttctgctgttcataaagtaggtggtttaaacaatagtagggataattcttatggaatttaagattctcttttccattgttgttcctagtggatactcttactcttacctctattgttgatgagcaatccaatctgaagtcagttgataatcagactaatggtaaaaatgaagaagtggtcgatgttaatgataaaaatccaattggtgtctgttttaacctgtgtgatattagcaaggtacacgaatctggtatgaaggagtgttataaaaaagacaccgtcattttaatattttttgcaaagaaaatgcagactttgaatttatttgacagtgccatttttttcaaaaaacatttttagacagaaataatgtcaaattatagttcataaacaaaagtacaaaatgagatacaaaaaatcattggaactaaaagtctcaaaaagacggaggaaacctcaaaggatcaagtaacgtactgagtaaacttcagacaactacagatctaatgacctattgggagtgtttcaatgacctataaagaaaaagatacgaacgtttgaaaaatccaaaaaatcaacttttaaggcctatcactcgataactaggtgtcagacaagaataaaagctacatttgttagtgaggaaattcctcaaggtgttattcaaaaaatataaaaaaaacactgtgttttgttcagaatacagcgctttatttttcatattggaatgatactggactgaagcaaaaataaaatcatttaatacaagatgagaaatttattacaataatgtaaagtgcaaaaaaatattggccatatgcttttaatcattttgttttttacacagtagttatttttaatgtaaaattacaaatacattttcaattcaactgtaatttaattctttaataactctactaagattggtaataccaaaaaatattttactcattgtatcccagtttttgactaataagattttacttttttgtgtttgttaaattatattttcaattgactttgtatctgtaaataaattaagttcatcttgaaaaataaattttaataaaaaaaccatggtggttttaataataattaatttcaatattagtagcagttaataattattttaatacagatttcttgtatacaaacttttagtgatgaaagtttcagcaactttggatgaaaaatttaatatttttaacaataatttttttttctttatcaatgaaaaacgctattttgtaagcaacggtttgttttttaacttggtattttacagatcttttgatacattacaaccatagtaattgcaagaagatttcgaaagtttaatcatttcaagttggaaaacatggattaatagaattccaaagaggaaactgattccactgtttcgtctgaagatgaaaagatgaaaaagattattatgttacaaatgtcgcggcctccactagagaaacaaatgttctgatattgagaaaacctttgaagttgaagagaacatttcagttaatatgtttgagattttaaaacaagttgttttagcaacaacattttaccaagaaatattttttccgtttccagattattaaaccaaatttaaaactactttcatttagtgagttgtcaagttaccaaaaattacaaagttgttatcagtgcacaacacaaaaacatgttgtattttgcaaaatttaattttacttctaaggaagaggtccattcaataattgatttaaaacataactatattttcaataaagataatcagttacataaaaacaaggggtttggccacgcatctgaaaatctaattggtcgatatcaaatctaggaattcttcgttctatttatacttagaattatttgtaacgtttcttttttctgatttgtgagcaatacttaaatctaatcagttttcatggcttaacttaataatacaatattattatgtatcatttaattttgcttagaatttccaatctcatcaatttttgcttagattctttaaagtaaaaggtgaagcttccgataaagcttttgcaacaattaaaaatattttgttaaaacaacaagataaaagtatttgctacattaggtcagatattgaattcaatatgacgttaacacccataattatgtaaatgatcaaaagatagttaacattaaaaattgcattagttcatgaagataaagttgtttaaattttagcatttacaggattcaagaagtttaaacaagaaaagtggtataaaaataaaattatagaagacagaacaaaatatatgaatagtggaaatgatactggttttagttctcatacttgtatctatggcggcgaatcatctgattcatttatgagcccccttaggtaacataaataatataaagaaaatgagaagaaataaaaattaatgaaagtgggaatatatgttccgttatataaaacccttgaacatccaaccgcaatcagcaggaagaggaaccaaagaccaagtagtattcaattgatgagcatctaattcagtttggatagcagataaccaaaaggatctctgatgttgttgagaaacaaatgtttcattgttactataaatagatgtgtttcatctatgtttcatctatttatagaaaagactagaccatatgatattagtaatacttatgattactaatgcctcatatgatgacaaatacaaacatgaaacatttgattattaatcaaaacaccaattatcttagacataaatttgtctatataaaagagaagtttccacttactctttactgttctttaacttacttattgtttttctttattataacttatatattattatttctttttataaccttaaagtaactaactatggatatctatactagagccgttaccgttcaacagatgtgaattaacagcctgattaaaagtagttggtaaagcagatgaaacagtagtagatgcagaaaaagcagtatgaatggcattggaacctaaaaataatgctttgggacgcttaggaactgaatcaacaatattagaaagctgagacaaggacctttgcattggaacaatagcagatggttgagctggggcaagtgctggtgatgaagtggtagatgatggtgtagtagatgatgtagatgatgatgtagatgatgaagcaagtgtttccggtttgaaacatggcttttgcagtggtggttgagtaatagatgctgaagtggtatcacttctgtaacgacgtaatggaagtaaggatggttcaataaaaacttgatgaacttcatcccggataagcaaaaacattaggaatagattcaaattcttcatcgccacaggaaactaatttgttttcatcaggaaaaaaattggaagtaccattatcttcttatgaaataatattatcaatagcattagaaattggaacagaagccacagtttcaggaacactaggagagttaatagccatttcaatattatctggaacaacaccaggagattgcatcataggtgaagaaaaagcaaaaactggagcagatgatgatgatgatgataaagtagttgagtgagcatccgaagtaggatgggaaggaaggtgctggtgaaggtgctggtgaaggtgctggagattgaaccggtgaatgatcaagaataagaggttcagcagaattagaagcaccaggtgaaataacaggaacacaccaccagcattagccaccatagaaaatatctgaaggagaaacgtcctccatgataggaatatcgtttttagagtttaacatgttttccctcttttcctttgaaattaatatcatgcatttgcaaccaaaagaattaaaaattgaataaataggaactctgccaatccataatttgtaagcagtcttaccattgagtcagatggatatctattaataattcaaactgtgatttgtcagaatgattggtgaaaaaataaattgatacaaagtatttggaaaatattcaccagtaattgtaccatcctgcatgtaacagtatctatcatcaaaaggaacagtgtttctagtgatcgccttaatggaaattaaatttctggaagtattagaaacataggcaacattactaagtgaaactctttggccatcatgaccattgaaaataacagtacctctacccatgatttgtaagttatcacttgaaataccaaaaacagtttgaacagaatttgcagaaacatatagaaatacagtaacgggcgctcgaacatttttgccttgtcgattttttaatggaagttcatccaactatataattttcatgtctatatacacttggtattcttatactactggtacatagacgtatatcttaattcttttaatgtaactatcagattaatcgtcttttcttgattgttaatcattattttattgtatcattatgcgtatggcatttttcgattgcaaatattataattattcatttatttttgtttagacagatgatgtatgtgtatttttatttattgtttattttttttgtttttgtttttatatattattatttttttttttgtttttagtatcagatattaatgtgataaattagtttgtttgggtgtgttccaccctttttttttaatttattttatattagtcataattaatatctctcaatatttcagtggagtttgcaatataatcttcttgcatctcttcatctctttgtgttgttttcattataatgtccgttttatcgtgcatataattgacattgttgtattctgctttattgtaagcatcatttgtattgttgtcattatcgtatagataaccttcgttaccgtcgccactttttccgctgtaatggtgatttgttggttaatagttggcgtcatttactgtatgaatatttgatagggaactttctccttttttttctttgtattcgtctgattttgcatactcaggtccattgtcctttgtatccgataactgtttaattgtaggtgtctccatgttttctttgtttttttcttccatagaattgtcatgaatataaataagtttatgttgcttattatcgtttgttaacccttctttttttgaagacgggtttgacgttgtgtgttgtgtgtgccgtttctcgatatcaggataatcagcttttgctttagatctcttccgatctcttgtattggggtttgtttctggaacaaaattttctctatcaaagtcttttcttagatggaaagggactttccctttggattcacgaatgtgcatgaatctttcttgcgcaacagtaagtagggtcttaaatgtgtcaatcttatgatcaatctccatacttttgcatgttatgtaacagtgtccttttctatgacaatttgtgcattttaaattaagtgggcatttgtttgctctgtgtcctattgttgaacacgctgcacaatatgcttctgataatgatacatgtgtataaaaagccgttgaaataatttgatcatctttagtaaatgagacatgatcttttggaggtggtagggaatttgagtttaattccaataaaatgtaatgatatgttggaggctttttagccattgtgaaatctttaataaaatttagttctgcataaaaagttgattggtccacgagtttaccatattttgcaaaagcatgttgtgttgcttctcttatgcaatgagttctaaattgacctggaaatgttactttcagcattgcaaattttttatttgagacctcttcattttcaatgaaggaggggtcaatgaagactttccagtaaactacgtccccgtaaacaaaaggagttgtattggttttgtcgatgtcttcttctttgtttgccatagaagtattgtcaggatttctatgtatttctaatgaagtatctatttcatgaacttttaaagattcgaaagtgttctttaactcgatacttgcgtttcgttgaattaagttaatatcatctagtgtaaatgaggatttagtggttaaaacaaagattttattccatctgttgttagaatctatgtttgtgcttgttttaacttggtatttagtccttttgtacaggttgtcttgaaaacttttgctttttagtttgcaatcatctggagttaatgtaggaagactctgactagctgcttctgaatataaaagcttaccattgattcgtgaagaggaatctggtgattctcttggagtgtcttcatttccgttgttatttttttggctcttttgataagtttgtaactaaaattggatcttctttttgtcctgttgtactcttagtgtaaccgtcatcgggaggaggttcttgccggtggtatccacctgtgtccgcctcttgtaacgacatatcttctgcaaataacatcctttgaattctttggttttctgtttctagatttaggcttgtttgtaataaaagcttgagcggaagaagcaccattggaagatgaagaggtagcaatatccttaagagatgcttcaatagccgataaactaatttgagggtcagcagcatctaaaattcttgagttgaccgagggatcacgaaacatttgaagatataaaagacctaacaagtgatcaatggtcataccatgagtaaattgagatctcatggtctttaaaaataataatcccttgtcaagtggcatagaggatgatttagttaacttgtcaaccattgaataaagttgacgggcagacaatctagaataatctcttctaattgctgctaataaggcagaaccagacaaaccttcacattgataattggaaataatatcaccatcaacggtattaataaggacaacttgaagggcccggttaagataaaaagtaagttgaacaacactggggtcatcgaccggagtatccggtgagactaataaatcaccgtcagtaaaaaattccaataaaccggacccaaaggtagctaaaatggagcggacaccaacatcccaattgtgataattttcagctgattttaaagtgttaatagagctctttggacacaagtgagaaaaggaactcataacctgttgtattgaggttatcctatttgcaaagtccatattagttataataataattgtattgttatttaaataagataaacaaaagtaaaataaataatataaagaaaagaagaggaaatacaaataataaaagtgggaatacatgttcccttatatagttatcaaaatgaacatgaaaagcaagtacttacccctctttgaacaaaacccctccgagcggggtttatttaaagtgtgaccatcttcgggagtaagggatgtgtgaccgtcttcggcaacatggaaatgaacatgcggggtaaggtaccccactttgagtttagattaaccatctcaacaaattcccaagtttaataacaagtctgttgatattttgtacaatctaagttattttatagtttaaatagtttcttcttttaatactgttatagttgaaaaatatggatcctgcccaaagagtcgttagattacaacatgcatttattgttcaagtcagtatatctttgcccatactaaactaaatttataaatttctaccttcatttcattaaaatatacaattttatacatgtaatctaatgactctttaagcaggatccatatttatgacaacaacagttattaaaagaataaactatataatataaattaatttaagcgtatggggtggtaagcaaaatttcccttcgggaagtgtttatccctacttataatacgctatacgccttttttgtagaccagctaaatgtttataaaattgatattagtgaaaaaatactttgaaactatatacaagtaaaataattataaaataattaataataagaagttatacattagaaagacgttctgttatatttttagacaccatattccgtacctctgtgtggttgtgattagctcttgtatcgtaacaaagccttaaattgtctaaatttgtacacctagacaatgccacatacaactgaccgtggctgaaaacatccttaggaagagttataccaactttgcctgaaaacgtttgcccctgtgatttcataattgtcattgcaaaacatattttcactggaaactgttttcttgtgaattcaaagggtattttttcatctggggtatggtcgaagttaatacgcggtagttgcacaacttggccagcatgttcaccattaaggattatacattttaaccatttaccagcaccacctgtacgaatttcagtaacaatcatacgtgtaccattaaccaaacctctttcagcatccatgtttctaagcagcattacaacacaacctttcttcaacctaagaacatgatcaggcataccagtttttgtgtgagtcatcattctctttctccaaagctcagtaaacaaaaccaacgaattgacaccactagatttaatagttaaaaaagcttttgttgaaacaacatttcctggtaatctgtttagcatcattccattaattttgttaacatcacaatttctaggcgccaaaatcgaagaagatgcatacaaatccatcaaagctttcaaattttcaggctggttcaaatgtttggccaactgtaattgatcatccgggtagatatcattggaaaaatctttagtctcactgattctaaaaaatagatcatcattgaaaccaagatcagaaaggttttcgaatccatcaccatgagcaatattaaaaccactacccagctccaaaagcttttttgcaatagcctgtctaacaacacgctcctcaggggggcatgtaaataaaattctcatgttctcagtaagcttcaaaaattgaatatcattagcaaacaaagcgcacaaaacagacctttgataaacttcttcaagagttggaccctttgtaacaaccggcagacattgacgaaaatcaccagatagaacaacaacacatctaccaaatgggttatcacattttttttcaaaacgtaataaaatatccacagcagtgataatagatttaggagtcattgtaattttatcccaaaaaatgatgtcacaatctcttataatatttcgttggatgatggttggttggcaaataacagttggtgatggttcacaacttttttcttcaactaaaggtaaaacaaacattttgtgagcagtcacccctttatccaacaacaatgctgcaataccagtagacgcaacagcaagaaccaatttttgtttctttcctctcaaatacctgatcatcaagttggttacaaaagtcttaccactaccagcaggagcatccaaaaagaaaatgtttttagcattaggatcatggttcaaaactttatcacaaattttatcaaaatgtgcccgttgtgtaacagtaagccttgaaattgcaagatcaatttcggaaacatcagcatcggttgttctaaagaaatctggagaaataccatcttcaaattgcccaggtaaaagatccggtgcaacaaattcagaagctaacattgtattttcttcattaaaattcaattccttgaagtccatgtctctgttcaaatcagcaaacactttaagaaggtaagcacgtaattgagtataatcatccaaatgagaaacactttcattttcagacaaagacataccatacaaagttgaatgtttaagaggcaaatcttcagctaaaatttcataagcatcggtgataaactttgaaggatcaaatatatgttagccagttaataacatgttaacaaaaagcctgcaaatatctggtgtttgtcccatagtttcaagacatctaatatattcataatcagttccaatcaaacctctttgacggcaagcagcatcgtatgaaccaagaccacattttaaatcatcaaagcattttggactctcaacaacatctaaaagtaatgatataaagtatctatctttttcttttgaaaaacacgagacagaaggaacatatgctaaagccccagagtttttcacccttgcaacccactctttttttccagtatcccatctaaacaatttgattgcatttttatacggtaagcctttttttaattcacctaagtctatcttattgaaatttttgtaaagaaacttagcatcataatgatcatacgtagaggtatcaaaattttcatcctgagtatcacgttccatgtaattgacgtatgcttcaattcgctcattcaaacggaaaaaaccgaacaacatgcttgtttttgaatcattactttcttgcctttcaatcatttcctcaactgaattatgatttctcatatcataactaatggaaaaaccagattcagtgtgtaaatgcagagcaataacagatggttttataccatgcatatggatagctgaaattaaatacgaaccttctgcaccactcacgtatctagtttgaatatattctccaatctcatctctattttcattttgatcatcttcagcaacttgaacctccccatcagttcttctaaaatttagacgatcagtgcctttactcatatatttaaatagatatttaacaacagcaaatgtacaaacagcatccaaattcacatgacatttatatttagacaacaaaattggattgtatgacacaatattttcatcatcgttaccaccaggaggtatgattctcccggcacctgaaacggtaaatgtattattagcttttctaggaaattgaccttttctacaagcacgagaattgtgacctctacttccgcaacgatctttcttgcaaacatgtgtcattaaacttttaaccaagagagcagtatcaggagtatcaggtgaacatcttgacaataagatctaatttttcataatcaataacggcttcaccattttcatcttctctttctaattcaggacaacgaattgccatgtgaatatgtggaagaccacgtttttgaaattcagttatccatgattttgcagttaccttcattccaagaatcttttctatatctctatcgatttctgaaacaatttgttgaaaacctctactaatcaaattgttacgaggatatgttgtgttgtgattaccgggtagggtttctaataatttttctgcatgttttggattcattgtaacagtcaagaacaaattgggagctcccattgctgcaaacagagctacagttttctgatatagcatttctaaaaattttggtgaaccataaaaactagaagggagagagttagatggtgtagactgtctgtcaagtgattcatttgtatccaaattagtatttggattgacccatcttgttgtattctgatgcatattatgatatgccaacttgttttgttcaaccatcaaactaattgtggcataaaattcttcaactacagaaccaccaatattaattgaattccaaatcatgttattgcttgctaaatattcttcaatattagtactggttgaattgcaacgatattgggtaataaaacgaagaaattcatttaaactgactctagtagaacgaagatcatcactcccatctgctaatttgatattagtacaccaaccatcttcaccatataagaaaagaggaggaaacctgagtggtaaaaaatgtggatgtgtaatgttaatacatttaagtccaccccttttgacactaacaacgaacatcattttttcatccacagaagtttgattataacccaaagccacttcagggactgttggtaaacttgaagttctacggtctctaccagtagcttgttgataataaagggcatcaccccgaactgctgatggattttgttctatttgttcttttgccgtattaaaacatttagcataaaagttttttctttttatttcatcatgcatgacagcaacaaaccattttaaagtctccatatcattttctgtgtaatttctagctctttcattcatctcatttaaaacattttcatcttctatttgttctgtggatccttctgtgttatttatattatttgtatgacgaggacggcgacctgtgaaaaattccagtagctgcatatgacggtctctggattgttcctcatcacctaaagaccatatttcggaaaatctatgctcttgatctccatctcgaataataccacctgtagcaacaacgattcttcctccaataacaagatgttttataccatttctggaatcattagttctaacttttgttaaatcaagagcaaacgaaagtactttgttcaaaagcatagaaaaacgttgataatccttgtgatggtacacctgcaaaacttcgtgattttccgggtacttgtataatataaataaatataaaaactaataagaaaaacaacataaaaaaaatattaacaaaccttggaattctttgtggtacttatactaaggattccaacgttgactaataatttcttttctgatttgcgagaaatactacattttgatttgttcttcgaggctcgacttaataatacaatattataatttattattcagtctcactcagaattaccaatctcaacaatctcaacaatacagattgattacttatatacatatatgttattcatgcttcatcaattcagtatatcttcatatattgaactgagtgtaaattatttcgattggattattttcaatcttttttgcctggtttaattctaataagaactaaacttttcaaatttacacagctattatgtatgtttaataaaatttttggtaaatttaaactctgaattgttttttttaattttgcagcattgcttgttgaaaaatataattagtttgattactagtttccgcgtgacgtacctaatcaacttttttgtcatttccccgggaaactgacgctcaaaaagttgggtttggtaatttcaatttccctacggtaaattatggcccctacttagtactacatatttatcttcaataacaagctaaatactcttttcacaaaatactttttataatactatatacacataaaactacacttaaatagaacccaatgttgtatcaacttatgtgtcaaatgtgatggatgcaaacgttgaatcgtctgtattttcttcattattagtttcttgaacaagtctttcagtaacctgtgggcaaaccatgtttacaacctctcttcttgcacgtcctcttctagtattaaaacagaatttaaagtttttcatgtcagtacatcgagataaaccaacataaagctggccatgagaaaaaacatcagctggtaaaaacaaacccacttttccagaaaacgtctgttcttgagacttcattattgtcatagcaaaacaaactctaattggaattgttttctaatgaattcaacaagcaacttagaatctgctttatgacgaaaaagaagccttggaagatccacctcattgccagcatgtttacctgttaggatacgacaagtaatccatttagcaacattttaatcatggatacgagttacgatcattcttgttccgttaaccaatccatctcctgcacttacatttcttaacaaaataactggacaaccgacttttaaacgaagttcattatctgggatactagcctctttataaaaaaatttacctggggtgtccattgactaataaactgagttgtagccccttcaattacttgttccgattttaagatctcaacagatgtaggaagtcgcccaagcacttttctattaacttcattaacagtaacgttttttggagtcaatacacaacttgaagcatacattctcatcagctcatctaatttcacagggtcgcctaaatgattgacattttgaaatatgttttgatcatacacttgtgttaaaaattgagataaagcagacatgctgaagaattgagtcaaatcagcacctaacaaagacaggtcaacatgccctttaccattaaatagatctacaccggttccaattttgagtaatgcataggcttgtcgttgcttttcagcaccatcttctggtcgaactgcaaacataattctcatattttcagttagtttcaaaaacttcacatcctgaatataaggtaaacacaaaaacgatctttcataaacatcaggcatacttggattatttagaaccacagataaacactgtctaaaatcacctgaaaagacaacaacacaaccgctaaatggaatatttcttttcttctcctcgcttaacaacttatctactgcgagaatcacagattttggagtcatagttatttcatcccatataatgatatcagcatctttaattatatttcgttgagttaaattttgagaacatgcaacgttgggcgaaggttgcccattcacttcatttgttatttgaatagcaaacatcttatgagctgttgttccagtttccatgagcaatgaagcaataccagtagaagcaacgggtaaaaccaccttgttattattttttcttaaactttttataataagaccaatgagaaaacttttgccactaccagctggggcatcgatgaaaaacaaattgctttgattcctgttaccatttaaaacactatcaacaatactatcaaaatgtgatctttgcttaattgttagcctttctacttgaacagcaatatcatgtgcagtggcttctgtagagttctataatacagtgaagagattccatcatccaaggtttcaggtaacaaaataaatgccattcttcctaaagttttgacacatctaacatactcttcatcagaaccaaccaagccaaatgcgatacaagcttcctcatacgtaccatgaccgaccttcaaatcatcaaatgatgtaaatcctttcaccgaattcaacaacaaataaccaaagtatttatttttatcctttgcaagaggtgtgacaggaggaacaaatgctattgcatctgacgctcttaatctggcaacccattcattcttattcaaatcccaacggaagttttttattgcttccttattgttgagatggttaatctaaacataatttctaatgcctcaactaagcctcaattaaaatgcctcaattaaaatgcctcaattaaaatgcctcaaagtttcatttttcattactatataagggaacatgtattcccacttttattatttgtatttcctcttcttttctttatattatttattttacttttgtttatcttatttaaataacaatacaattattattataactaatatggactttgcaaataggataacctcaatacaacaatcctagtaaagtacttttcgttctgttgtctttcagcagcttcttctggactcattccaaacagtgtattgtaccttattgaaaattcagcttcagtatgacaatgtagtgatataacagcaggttttataccatgcatatggagtgcagatagcatgtatgcaccttggatgccactcatgtatcttgattggataaactctttcattccatcaattctttcttcttctctattttcagtttctccatcaacatttgatcttctcatataagcaatatcgacacctttgttcatatatttgaaaagatatttcactactgcattactaccaacaacaccaagattagcatgacaattatactttgctaatattgtaggattgtaagagaccacatttttatcacctccaccgcccggaggtaaaattctaccagcttcagttagcttaaaaccattgcgtaattcccatggaaaagcaccttttttacaatttttaggattacctccattacttccacctcattgaactgtacatttatgaatcattgttttatcaaccatttctgcaactgttcttgaaacaggtctgcatctcttcacaattttatttaacttgttataatcaatttcgatgtcaccgtttggttgttctacttctaaatcaggacaacggattgtcatatgaatgtgaagaagacctctcttttgaaattctgtaatccaagcctttgcactaactttcatgccaagtaacttagaaatatctctatcaaattcagacacaatttgttggaaaccactagcaatcaattcatttctagattcattggaaacatggataaagggtaaagtatccatcagtttttttgccaaatccggattcattgtaatcgttaaaaataaatttggaggtccaacagatgaaaaaacatttgtagttttttgataacaccaactagaataaccttcagtcccaaaaattttatagggggcagttgtatcagaggtggattgacgagaaacgttttcattcatatcaattcttgtgtttgatctgaatacacgctggttcattgaatgaaaacctaaatagttttgttccaccatcaattgaacggtggcaaaaaactcttcaacaacagatccacctaaatgaattggattccagaccatctcttggtctttaaaattctcatgggcttttaataaaggatttttacatctgtattgtaaaatatgacgaagaaattctctcatactaaattttttacttctattatcagaagtgccatctctcattctaatgtttggagcccaaccatcttcgccatttaaaaataaaacaggaaatctcaatggaagaaaacatggatgtgtaatattgataaatttggttataggttgattatttgcatctgtacctttaacactgaccataaacatatattcctcatcgtctgatttttgttcaaagcaagcgaaacttctgaagcagtgggaacatttgcaactctacgattaacaccttccagatttatataaaaacacacttttaaagttacgatttgaaggatctgattcaatgaattccattgcagttcggaataacttagcatatttaatattgtgtgccatataacgatgtaaaacagaaacaaaatgttttaaagtttcaatatctcttgaattgccatctcttaatgcttggtttgaaggatcatttctcaaaagaaaatactgaacaatatcaacatgacgttacctggattgatcgtcatcgcccattccccaaatttcagaaaatctacactcttctccatcgaccccaataagtccaccaacaacgacacgaagttcaccttgcatcaagatgattttttttctatttctagagtcattggcatttattttagttatattttgagagaaacataatattttgttgacagtcattgaatattttggccaaagtttatgcatgtatacagcaattacctcttcgtctgttggttttttcaaatattcaattggaagctgaactttaccattaccacaacacccataaaatgttttattacgagtacggagtgccctgcaaaaatttgcatgtttgggaaaaacaaatactatctgggtctacctcatccattcggtacctgagttttctgggataattagggtcaggtaaagtctctccaatggttggtcttcttcccctacttcttcttcctcttccacttcttctacctcttagacgtcttggtagtatgatgttttcaactgtaaaattcgtctcttcattagcagcatttggagttgaatcagttgtggaattgcttggttgttgttcatcatccgagtttctaacaacgttattcaaattagtttgtcgatcttcttcttctgcttcatcgtcagttatatcatctgcatatacaggtggatggatatcaattggttggtctgaatttgcaagcgcaatggcaattgtttcactcgtttgattatcatgttccagatggacatttttagtatcctatatcaaagttagtgtcggttcagtttttttaattcaattttattatatacattgttgtaatctgattactctagatgcagcgtccattattaacaacagtaaaagttattaaataaactaaattaaatataaataaatataaaataaataagaaaaacagcataaaagtaatattaacaaaccttgaaatttttcgttttatttatactaagaattccaacgttgactaataatttcttttctgatttgcgagcaacactaaattttgattggttctttgaggcccaacttaataatacaatattataatttattattcagtctcactcagaattaccaatctcaacaatctcaacaccttaccatggtcacaaatcaatcacatcttcaccattccagccatctcaaccatttcattaaatttaaccctatttaaacttttagttaacatatcagcaatcatataattggtactaatagacttaatttcaacttctttagtttgaatgtgatatctaatataaagatgtctaatatcaatatattttgttctttgatgatgaactggatgctcagataacagcttacaaccttcattatcttcatatatagttgatgctgtaccacattttaaacctaatcctttcaataattgtctaatccacaacatttccttaacagcatcactcaagggcatatattcagcttctgttgaagataaagcaatagtttgttgctttttacatttccatgtaacaattgaattaccttttatcaccagcccaatctgcatcacaataacccactaattcaaacttattaccttcactgaatattaagcccaacttggttgtacctttaatatatcttaatgtatgtttgcaagcacttaaatgtttggagtatggttctttgataaatcttgataaatatgaagcagcaaatgctaaatctgttctcactgtattagcagcaaataacaactttcctaccatgctgcggaatactgtagcatcagattctgaaagttttaaaccatcatcaatagaattaacatttgaaagaagtggtgtagaaacagcaatacattcatttatcccaaattcttgtaacatattgtttaaatatttgttaagacgtagagatataccttttgaattctgtgaatttttcatgcccaaaaaggtattcaccaaacctaaatccttcattttaaaacttgagtttaacaacaatttaacttgattgataagtgccatgttattagataaaattagtaaatcatcaacatacaaagcaactaaaacaacttcagcattaactatttttgagtataaaccaaattcagataatgatcttttgaaaccagcagatagcatcacatcattaattttcatattccagcacaaaggagcttgtttgagaccatatagacttttacggagacgacaaaccatattgtctggagcatcaacaccatttcttcttgtaaatcaccattaaggaatgctgttgtaacatccatttcatgtaccgtcagtttgaattgtgcagcaatagcaaataaaatccgaatactttcataacgaaccacatgactaaaagtttcaccataatcaacaccttgaacttgtctaaaaccttgggcaaccaaacgagctttaaacattggtacattaatattgtctttaatattaaagacccagcgacatccaattgctcgtttatgtgaaggtggttcaactatatcccatgtatgattttctttatgtgcctctaattcctttttaatagcaacttcccaaaatttaacatcaggtgaattcatggcttgcttgaaagtggtaggaattggatttaaagctgatggtatagaagcatctttaatgaccttgaaaatagcaccaagaaatgtttcaactcttttgggaggtggaccttcagtatcagtaacagcagaaattgatcttaccaatggaaaagaggaattatcagcatcagtaagttgattaatcaagtttaaatatacttgtaattcagcatcaattgaaagattatcagcaatttcagaataaatatcatcgatataaccaagatcaacctctgcttgatcaaaacctaattctggaacaacagatggagcagcagatagaacggcattttcattttgaatttcaattgaattttcatgttgaatttcattcgagatattaagatcatcatttgaagaattagcattgagtacaatcagaaacaacagtagttaatttagttgttggggaaacagtaggtgatgtagattgaacagagacaatggattcctcagaggcaacagtctctaacaaaggtgacgatctaagttcggatgtattccatctagttgattttgaagtagtattaggatcatcagatggaacatagctagaatcagtatcaacaacagaaatatcaacaactataggaagaacagcaccaccagttttagcaccaaaattaacatcagagggaggtaacatatgagaaataggcaaatctgtagatttcttatatgaaaatagtttatcattaaacttaacattattggaaaaaacgacatcattgagtgaaggaataaaatacctataagctttataaagggaacttaaaccaactaaaacaccagaaacagaaacaggagaaaatgaagatgttcttttttcaggtggaaccaaaacataacaagcaacaccaaaaggatgaataatatctttatacccataccatctttcaaaaggagatttaccattaagatttcagcaggatatctgttgattaaatattcagcagttttaacagcttcagaccaaaaattacaacaccattttgagatgaattataagaaacagtcatttgatgagtaattcccttttcagcacaataagcatccatttcatcattacagaattcaccaccattgtctgttctcaaaattgcagctttgaatcttttagaggcaaataaattttcagcagtttgaataaatgatttgatcaactgaacagtatctgatttcttttgaattggaatgacatgagtccatcttgaataatcatcaacaatagttaagaaaaatttttcatcattagtgcctttaactggaaatgaaccacaaacatcagcatgaattaattgaagtggagcactagctggaggagtagttgatagtttaggataaacttttgtcatcttaccagctgcacatgacacacactttccaacagaggggccacctgaataacctaataattttaaggttgcaggagaaggatgacctaatttagagtgcattaattcaacattgaccgacttgacagcaaaagtctgagcaacagatggaacataatcagagaaatacaacgaacctttggtagaaccaatttgtaatttagaatcaaatccatatggaataaaatgaactttatgttcagaaaattgaaaaacaccaaacttagatgctttctttactgataaaatattttgagtaccatcaggaacataatgaacctcatttaaagtaatttcatagccagtagatggataaactaacttgactgtaccaatcccttcaacatctaagggtgcttcagcaataccagaaactttaccactaataattctaaaatcaacaaattggtctttgtgaacagcaatatgaatattggatccagaatctaacaaacattttcttgacaaaggcaccttaacatttgaagccatccatgcaaaaccatttgaagtggtagtagtgaatgctgatccaccttatttcggagcattagatgcaaaagcaggagccggagcagtacaatctctagcataatgaccaggaacttgacatctgagacatgtaatttcatttggagttcttttaaagtttctcctaaatttggttttattgttcttaaccataaaagtttgagggacagttggactaaaatcttcaagtgccacttcaacagctgataatgataaatcaggtgcagcacaatctaaaactttagctttagctaatggtgagttgaacatttttaagtaaaataaccccatcatttgattaatttcaggagtattattaaattgataacagacctttttgaaaatagctaaagcttcaccaggagaagtacctttatttctggcatcaacagcagagtcgaccaaattggatagttctctaacaagagatatgtgaatatctacttctaattaacactaataaatcaaaaccaacagcaaaatccgtttcaaacttatcaaggatagctggagcaacagtacagtgcaaaattgattgaacaattaaggtgagaataccttgaatttgtgcacttaagacatcagtagtatcgggagttaacatcaaatctcctgaagcaaaatagacatcaacacctgcaccaacagtggccaacattctaccaacatatttttctcattttgaatagtttacagcagcagatagtttagaggtactatcctttggaaatagagtcgagatttgactcataacctgttgtaatctaataattctagatgcagggtccattttatgacaacagtaaaagttatttaaaggaactaaataaaatataaatgaataaattaaatacaaaactaactaaagaacttcttaaaaggaacgttactaaacctaggaattcttcgttgtattaatactaagaattccaatctttactatcgtttctttttctgatttttgaacaatacttagatctaatcagttttcaaagctctacttaatagtacaatattattatgtattatttagttttgcttagaatttgttgaacggtaacggctctagtatagatatccatagttagttactttaaggttataaaaagaaataataatatataagttataataaagaaaaacaataagtaagttaaagaacagtaaagagtaagtggaaacttctcttttatatagacaaatttatgtctaagataattggtgttttgattaataatcaaatgtttcatgtttgtatttgtcatcatatgaggcattagtaatcataagtattactaatatcatatggtctagtcttttctataaatagatgaaacatagatgaaacacatctatttatagtaacaatgaaacatttgtttctcaacagaattaccaatttcaacacaatggaatcccagtttgatgtctttgtccactcctatccaatcgatttgattagtttgattatttaaaattacgtaattaagtattacttatcattgtagaaaaaattatttaataaaaatataaaagctcttatggccaagttggtaaggcgctacactagtaatgtagcgatcctcagttcgactctgagtgagagcattattttttatgttcttttaaagaagattactttgttaatgttcttaaagataatattttaattttttttaaaaagctacaacctatatataacctgtgtcttgctctcaaagggacctttgtcaaataaatccactaaaatattgggtgtaactctaaataatactttctgagaggatttatatgggtcttaaatccgtgtgaattcatagttttcacagaatcgataatgcactcgatttatgtgtaacagcattcacgtatgtattactgataaaggtccgatgcaaagcattgactttatactgaggtatatttcaactggagtattcccaatcaaaaaacaaaccagagttttttaaaaagacacaattcacttttctttttaaaaaaaaagtaaaatcaaattgatattttataatcaagtggaatatatttgttgctaagtaaattggattccctattaatttatcaaataaactggtcaataattataccaataaatgtaattagtttttttaacttaccacatacactactttttttttgaagattgtttcaaatagtatttttgtcttgttaaccagtgcttaaatttttcaaaaataagaatacttcacttaataaatccattatgttgttttttctatgattctgttgagattgttgagattggtaattctgagtgagactgaataataaacagtaagactgtattattaagttgagcctcgaagaaccaatcaaaattcagtgttgctcgcaaatcagaaaagaaattattagtcaacgttggaatccttagtataagtaccacaaagaattccaaggtttgttaatattacttttatgtggttattttacttactttaagttaattttataaattatatagtttgttcttttaataactgttgttgtcataaatatggatcctgcccaaagagtcgttagattacaacagattcatcaaagctggaccaaagagattttgattttgatttagtttgatttgaaaacttgtttacatctatatgcttatacatctgttttctgtaagttaaacactctcagtatatacaaatattaaatttagcagcatcacgtgacctaaaagccacagacgaattttacacaagggttaaagaaacaataatctccgatatagtgtaacggctatcacggtccgctttcaccgggcagacccgggttcgactcctggtatcggaactaatattttttaatttgatatttttaatgtttttgatttattcagtcttagttacatgaattcaaaattgaagttaagatcaatgattttaaaatagagttttttttattgactttctttctataatggtttctggtaactgtatagaaataaagaattacccatctactgatcaatttaatagaattagtgaagcgtccagtatcattaacaaaaacttggaatctagaggagatgaaaaaataaagttttacacaattaaatcaccaaaaaacattgaagaaatttatcaaaatgatcaaaaacttatcaaatcatttaataacttatttcaagaagttgatttattaagaacaattaattcaaccaatgcacaattaattgatgataaaaatcgtgaagttgaatattggaaaaaaatggctcaacaaatggaggcatcaaagaggaatgatgagagtaaattcagagatcttgaagttgaaaatttaaaattaaatttaaatgttagtaatttaattgagaggcaaaagggagtagagagtagaattcgtgaaactaggaatggatggaaactttataaagaacaagtagagagggagaaacgaagatatgataatgataaattcgaactcttagagagattaaagtctaaaagaaacaaaacatggaggaaagatggtaataataatagtccaagtaacagaaatttttataatgacgaaacatcaagtgaaatgattattcaactattatctgaaaaggaattatcaaataagaatattttaaaattggtatcatttctcaaaaacttatataattgtttagagaaacttaaggcaagtgatggaaattaccccattgataattcttttattgctaaagatagtgaattagatggaataaattatactgaaattgatattttaatggaaggattaaacaaaaaatttattacattacttgaggaaataaaagccgagccttttggtagtgatgatacattcagatctaagagaataagtaaagaaaagaaacaagaagttgagatgttaaaatcacaattagcagaattacagtataattataataaagttgtgaaaacaatggaagaatggaaaaaatggaaagaaaatattcaaagttgaaatttaatttaatttaattattattctaatactatagtacagatctacacagtttcaggtttatgatataaggtataataatcaaccaaataaccatttaaattgttttctccaccaacaggtgttgccattaatgttctaaatgagcaattatccccggcttttatcaagaataggaaatctttccaattatttttccaaccataattataatcttccttgacaatatctatcttttttctatgcatcagatcattagttattagaaccatttgatcaaatcctaccattcgacataatttcgaagttgaaagtttagttatgaaaattattggaaatgcaataaatttggattttttcagtttttgtgaaacattatcaaaaaatgataagaataaattagtttttatttcatctatatcatcttcatcatcgtcattatcatcattcattgtttcaaaattattttcaatttcagtttcagatctattaccaactccactagttttcaagagaatatttaatggatcatctgcaggaactgaagcaaaaatatcctcttgaccttgatgtgaatgtttatatttatgagaaaattcataagttgtaaaacctttagatatttgtatactttgtactaataataaaattgttaaccaaaacagttgtaatgaaacccaaaaaaagaaataaaatagaaattttgaagaatttgaagcagaacataatccatgtggtaagaaatgacacacggtgatattattaccatttaatggaacatcctcaaaatagtttaatgctaaatttaaccatgatataacagcaaattcaaggaaaacaacgaatgcaaagaaaagtttatgatttcttactcctatattattattaacccatggacaataatgatcaaatctagctatgttaagtttcttctcctttgaaaatttggatcttaatggctttctgatattagaatatatacaataattattagaatcaaatttcctttcattaagcaaatttataattgtagattgaatattttcaatattagtttcctttgaaatacaacctggatccatatttgaagatttaatgaaataataaattgttccagttgctgatagtaagaataagaaattgaaaatatttgatttaccaatagttttaggtaatattttaaatatccaagtaataatacaccaataagcagttgatgaaaatacacctgcaaagaatgaagttctcattaaatttaccttaccttttttcaaagaaggtattaacatttgctttaagaatatttgctgtgttataattattaataaaattgccaatagtttcagtattatttgtatattcaatgttaaaacgtaaataatttctggtaaggtaatataaggtaaaacaaatataaggaaattagcccattcaattgttaaatgagttacccttttaataccagtaattggatctcgtccattttcctttaatacattattccacattgttgaacaattcatatcctttgcaatatcccaacaagatttaccatcattagttttcaaatctatattactttgaaattctaataatgaagtaataactgctttactaccattacataaagcccaatgaagaggtgtaaaaccatctgcatcaattaaattaacttcagcttgtgcatttaataatacatcaactgataagaaatctccttgatatgcagcccaatgtaatgcagttctacccattggatcagtgaaatttataccatctaaaccaatatttttcaattcaccatcattattatattgattaattgcccaaattgaataaataaccatcattacattacttgaaaaaacagatgctaataatatattaataccatttttatcaattgcattaacatttacctttgcatctctaattaaataatctgcaatataaaccaatccatatctaacagcccataataaaggtgttgcattcatatcacctgcctttacatctggatctgcaccaattgaaactaaatatttaactgttgtaagtttattatttaatgcagcccaatgaactaatgttataccatctgaatcagttaagtttggagagtataaagtattattattgttatgattatcctttgataaataatgtcttaaaaattcaacatcaccacgttgagcagcatgtattatttgtctttcaatatcatcttgttgattatctaattctttatcattattattattatcattatcatcatcattattattattatcatcattttcttgatgtattgcaaccattgacgcaattgataaatcatcagatgttgaagaagataatgggagggatgtaatagtattattttctatatgtttatccatttcattatcattatcattgtcatgttgatttgaacttatttgatgttgtgtatttttatcaatatttagtgaaatattttcattctcttgaaccatactatcactagtatcacctatagaggcatccattgatattatatactaagccctggataattatttaaaaaagaaaaagtgtttatattaataagtaagatataacaaacacaatatttttcatgttcgcattatggatatattactaacctatttattactattgagaaatacaaattgtcagttaaagttttatacaacaaaagttataaaaagaaggataatacatattatattaatattaattaattaattaagcttggactaatctcatagtgtttgaatgaccagcacctcttttatgaccttggataacgacaactgtatcacctttactaataatatttaatttaagagcttcatcaattgcataattaactctattttcaacatcttgaatccaattttcttcataagcaccagtatatgggaaaggataaacacctctataaagatgacagaatctagttgatctatcatttcttgtaaccattaaaattggacaatttggtctatattttgaacaaagtcttgcagttgtacctgaagttgataaaacaataattgcctttgcttcttgttcataagttgcagtaactgcagacattgctaaagtttcttgaatatcacaaggttttttagttgcttctctaatttcagagaattgagtataagcaggtaatgtcatttctgcaattaaagttgtatgatgcatcattgaaactgcttcaattggataatcacctttagcagtttcaccagaaagcataacacaatcagcaccatcaacgatagcattaccaacatcagaaacttcagcacgagttggtcttggattataagtcattgattctaacatttgagttgcacaaataactggtttaccagcaagattacattttgcaattaattgtttttgaacaatgaaaacttgaggagcaggaatttcaatacctaaatcaccacgagcaaccataacaccatcagtttctcttaaaatttcatcaaaattattaacaccttgttgattttcaattttaacaataattttaatatctttaccttcttcacctaaaactttacgaatttcaagaacatcattagcagatctaatgaatgaagcgaaaaccatatgaactttatttttaacaccgaattttaaatcttgtttatccttttcagataatgcaggtaaatcaacatcagtatttggtaaattaacacctttatgagaagaaattttacctgcattaacagaaacaactttaatatgttgatcatcaacaatttctaaaacacggaatgataaaacaccatcatcaacataaataattttaccaggtttaataactttaacgatatttttataatcaatatacattttttgatcatttgaagaagttttaaattgatcatcagttgtaaataacatttcatgatttggaggaattggataatctaaattatcaattgttgtaccagttctaatttctggacctttagtatctaaagctaaagctaatggtctaccagggtaaacttcctctgattttcttgcattatcaataactgattgatgatattcataactaccatgagagaaattcattctaacaatatttaaaccatgcttttcttaaagcaactaaagtatcaacattattagtttttggaccaattgtaccaataattgaagaacgtcttaaatttctttcaggaacttcattaacgtttaagttagttaaccaagatatttttgaactagatgacatatagagagtagtgtgggggcgtttgtttaatttaattaattagttaagaaatttggatatttcttgtttgattctttgaaaagaatattaagaagtaaataaataacaacagcagagggggagaaacaagaagaggaggaaaaagatacctttaaatataaattttaaataataaatataaaacagattaaatcagaacataatggtatgttgccatataacaatgacttaccggtaagtgatgtccgaacggaaatttgtcaggttagtttttttcattacgtaatatgtcttttgcacagacgtatcgaccgcatttatttattttattttattgcagacgcatcgacgcgggctcattttttttttgattttttcaattttttcaattttcgattttcgatttttttaccggactatatccccgatggcaaaattgatcccacattattctttcctaaatggttcaattgcatcacgaactacacaatgatacagtttgattcaaatatatctacaacacatgaaaagagaacagttgcaaagaaagcttgtctctcttgtagagagaaaaaaattaaatgtgatggtgaattaattgtatcttatccaactgagccttcattgaataaaactttttataaaacttgttcaaattgtaaaaattcaaataatgattgtatatttgtaccaagtaggagaggtggtaaaaggaaaaaaagtgttagtgttaataataatagtaatgttaaatcagataattcatcaattatttcagatttaaataataataataataataataatactaataatatgcagaataatgataataataataataataataataatcaaatacccgatcagtaccatgatactaatcaaatctataacaataattatccaacatctgcatcaaatatacccactaatataccaataaattattcaaatcataatcataatcataatataccaatgcaaatgcaaatgtcaatgccaatgcaaatgccaatgccaatgccaatgcaattaccaatgcaaattccaactataatgcaacatcaaataccaattcaaatgcaacatcaaataccaacaattcaacatcaagtacctatacaaatgtcaatgcaaatgccattacataatgatttaaatgataataattataataattataattataataataataataataatagttataattttcaaccctcctatcaacaatatactaatggtaatcaagttaatttaacttatcaaaattataataatggtaatattgataataacaatttttatactaatcctcataagattacagaattagaggatagaaataaacttcaagagaataattattgtaatactaatggagtagaagaaatcaatgaaaccacaaataatcataataataataataataaaaaacaaattcctaaaattgaaggctatagtaaagattccgaatcttgggtagaatctttagctccaagtgattcagttacaatgattgaagaaaagaaaagaaggaaaggtcaaaatggaattcataatcaaaaattatcagcaatttatgaaccaaataacaataacaataacaataacaataacaataacaataacaataacaataacaataacaataacaataacaatactaacattaatacatctaatactaattccaattctaatactaattcaaatgtatcttataaaattttatcagatagtttaaatacagatatttcaacaactgataaatggattaatgaacaatcaaatcaacttaagagaaataatgaaaaattattggaaaataataggaaaaaacagaaaaatttacaaataactaatttaaatgttaaatgcccacaatttattaatgaagaattattagaaagtttaaaattacctgatttccaatcattatataaattaattggagttttctataaatatgttcatccaaatacattaattttacctaatatgtcatttttaattgaatatttaacaatgagtagtgaaactattttattaattgcatcaatgtgtaaaatgtcatgtaaatatttattaaatcatgaagttaaaaatgatagatggttagatgaatcatattgggttgaattaattgataaatatcagaaaacttcaagtattaaatatattatgttaagttgtatattacaatgtacaagatctgatgatgattatattactacagcttttgatattttgaaaactattagatttgaagatttattaaatacaaaatttttaagagattttaatcaccttcatgaaaaaatttttaattcaagaattttattagagagagaaatttcagttagaatgtattggaatgcatataaaatttcaatttttagaagaatttcatttggttatccatataaattagataatgaattaaataaattaaaaattaataaagaaattgaattaccattacctgatataaaatattttaaagaaactgaaaatttgaaaaatttaaaatcttcatatattaaaaatttaacattagataatataagtctttcaaatcctgatggatctcaattatatgattctgtttgtttaattttatcattaattattttagaagatgtattaaattcaatttcaacaaatactttattaccatatacaattattaaatttacaaataaattaaataaaatgtatcaattacatactaaatataaacatttacaagcatatcaattagagacacatccaaagaaggaaccacatattagttatgaatgcaagtaatttatcaagtgttattttaaataggataactatattattattttcaattcatttaagtaatgatttattattatatttaccaaaatttagtgaatcatttaaatcccaaattaaaccattaaatgatttttctattataaaagtaaatccaaaacttgtaattgaaaaatccaataaacttttaacaaatgaaaggaaattacaaaattggacatggttattaaaatcaattgatacaatttttaaattaatttcaattattcaattaggtgatggagtttgtagtacaaatttaaatgatgaaaatccaattaatgaagttttcgaaacattagttggaccatgttgttcaggtaattcaaaagttgaagaatggtgtaaatttaatacatggacattaaaaatttctaatatatcaaatgagaatcaaggatggattcaaatgccaccaataattgtttgggcaatgattcaatgtataccaattttaatgagtatttcacttacattattagtaattgaaatcaaaattgaagaatttgatgtaaataatgaaaatgaaaatgagaatgaaaatgaaaatgatgagataattagtgagaatgaggatgaagataggagacaagttacaggagatgcaattcaaattgttagtgattatgaatataagaggaaacttttaaatgatagtaagaaaaaaattaagataattgatagggaaactaaagaagttttaatttctaatattgaatattctaatgcaccaaattttttcaatttattaataagggaaatggaaaataataatgataatattaataaagttaatttatcattaattaagataatgattgaaaaaattaaaattatacgtaaattattacaagtttatagtaaatacaatggggattgtacagttgttggtaattattgtgataaactaatgttatatattgaagaattatgtagttaaatatagactatttatattttgttatcataccttcacattcatttgtcattacatgattttcaagccaatctttatttgaactaaattctttaaagcaagcagcacatctaccatgtttatcaattctatcatttgattttgtaccagttggataaacaaaatgaagtgcctttaaatgagttttaaaagtatcacgtctagagaatccaccagttggatgacatcttggaattttcaaattatcatcaggtatcttttgttcagtattattattattttcaatatattcaattgatgaatcaaaatatggacaatggaaaggttttgattttgcatgtttctttaaatgtcttgttaaataacctttaactttaaaagttgtattacaaattgaacaagtataaattttatttttatctttatctttattcttagttttatttttatttgatattattgaagaatttggtgatggtgattcaaattctgttgctgatgatgaagaaggtatactattattattattgctatgttttttcaatttcttattattattattattattattattattttcattaagttttgtaattgttatattattatcagattgttcaatatattcacgttttaaaggatttatggtattattaataaatgattgaatatgattattatcataatgataatcttcataatcagaattaaatttattttcattttcattttcattttcataatttaaatcataatttgaattatctgataatcttatataagataacattaattcatcatctaaaggtaagggatcatccaaatcattaatattaatatcaatattatgtttaattgtatgtgtatttgtattattattattacttaatttattaatataatcatcatcatcaaattcataatcagataaaatttcatcattaaaattattaaattttgttaaattattatttaatgaaggataaattaattgattattttcatttaattgaataatttcattatttcttaaattattttggaaattattattaaaattttctaataattgattataagaagttgattcattaattggatttaaatttgatgatgatttaacagaagtattagtattattaactttgttaacattattattattattattattattattattatttaatactaaatcttggaaatcccaattaaaaggatttggagaagtaaaatcataatcgaaatcagaaactgcacattgacgtaaataagttgaagttgaattaaaattttgataaataatttttttattatcaaataaaccaacatgtaaatgtggggattttttaataatattagatttattagatttatcagtaacttcactatctttgaataggaataataatatttttttatagagtaaatttagattttttgataaataatttattatatttgtaaacattattgtaacataaaggtattattaaggagcaaatgggagcaaatgggagcaaagaggggggtatatttgaagtgttaatggttgtaaaatgtataattaaaaaaggtagagatataataaataaaaatgtaaatgatggggatagataaggaaatttaggaatataaagttaaaaatactgttataattataatatctaaataatatagaacttcataaagataaaaaaaaacatgagattgaaatgaagatagaaattgaagatagaaatagcaattatcatgtatatttggaagaaatttttttctagaaataatttataaatcaaaattatgcaatgatgccctgaaaataatctatgatcttctctatattcctacatatcttatcttatcatactctacttatactttacaatgcgttataatatactatagaatactactctatagtatttcaatatcaaacatactatactatactatactatactatactataatacagtagatcaaatataacggataaactcctcctcccctaagtcgtttctttttattttcatttttagacttaaatgaaaataaaaacgggtgccgcacaagtacacggcactagcactagtactaattactagtaagtatttcttatctccggagggggaaagtcttagcgacgttacgcatgcaggattacgtaattatttgaggtcacgtgcttttcacgtgacacgcgtcgacgggacggaatttttgtatattacgtaatcgcatgattatttattcagtcttagaatagattcagaatagagtagaatatagaatagaataatgtcatgataattgaatactttatcttttctatttttaacaagtctatctatcatccattatccatataatgacatcatcaacggatacaattaataataataataataatacaaatacaaatacaaatacaatttcaagaatttcaatgtcttcattaaatgattatgaattatataatcaattaggtcaaggtactttcggtattgttacaaaggcaagacaaaaaaattcaaataaattagttgcacttaaaaaatttttaattaatgataaaaaggaaggtttccccataactgcatttagagaaattacaattatgaaaaaatttaaaaatttaaatattttacaaattgttgatataatttatgataattcatcattttatacagtttccccctatatttcatcagatcttaatggtttattaaataatccaagaattaattttaatttaagtcaaattaaattaattatgtttcaaattttaaatggtataaattttattcatcaattaaattatttacatagagatattaaaactgctaatatacttttagatattaatggtataataaaaattgctgattttggtttagctagattatatcatggtaatcctccaattaattctaattctcctcccggtggtgggaaattcgattatactggtttagttgttacaagatggtatagacctccagaattattattaggtgatagaaaatatacaactgctgttgatatttggggaattggttgtgttttcggtgaattattctttaaaaagccaattttggaaggtaaatcagatattcatcaagctgaattaatttttaaacttttgggatcccctaatatggaaaatttcccaaattgtcatttaattaatagaaatggtattgatttaaaaaataattatccaagaactttagaaaatcattttaaagatttaatgtcattagattcaattaatttattatcaggtttattaactttaaatcctcaaaaaagatttaatgctttaaaagctttagatgatccattttttaaaaatattccattaccttgtaattatcaagaattatccaatttagaagattctcatgaatcagatgttaaacgttttaaagaagaaatgaaatcaaatgttaataataataataataatgtaccacatcatcctaaatcatttaatacaattcctccaataagatcatcaaataatattaatataccaacacaaccaagtgcacttaattcaaataatataataaataattcattagatcatagtaaatatggtattgattcatcatcttatatgtcaagaactgattcattatcaaatatgaatataacagataccaataatgaaataccattacaaccaaaatctcataataaaattcaaaaatcaaatacttttaatcatcaaataaataatattcaaagacatttagctcaaccttcaagaaggaaaagatttgatgattattcaaataatttatattatgaaaatgattatgaattttcaaataaacgtttaagatatgataataaatgggatgatagaggaaattataatcgtaattataataataattataataataatcatcataataatcatcatcataattcatctcataatcattataaaagtagtgaattatatggtagtaaaactaatttaaatgataataattcagattattcagttttatcaaaacttattaataaaagaaatattaaatcagataaaaatgacaatagtaatggtactattgaaaaataattaaataatttttataattataattataataatttatataagggttaattaatgacagacaagttttcaaattaaatcatttaataagtaaatctcgcattaaaatttcaatttaaatcagtaccagtggcgaatgttaataattttttcactgcttctggtggctctgtttcttatttcttatttcttctgtgtttgattagtttatatgatcaactaaatgatacattactatgaattaactgaagacaacaattgaactaaaatattagctttaaatatacacataagtatctgataacaattcatttcattattttggaaaattttctaattgttgatattaatttcttttttaaagtcattcaattgaatcaaaatttcagtatttcattaaaatcacctattactacccacatactttcttatatgctaattatcaaatgaatactcacaattagccactacaaatacatacaaatccatacattcaatacgaatccgacgcatcgacgtgcgcatcggagttggaaaaagggggaaagaaaaagttgagccaccaaaaatatttcaaattcattgatcttggaaaaaggggaacatgataaccataataattaaatcataatagagaaatcacttctttgggagatacttaatgtatttgtttccctttttttggtatttattgtgctttctaataagtttccccttttcccactttttttggtttgtttgttatactttatttttccttcaaaactttaaaaattattatcttttcgttttttaacgaactcatagccagttagttactatacattaaagtttagaaagttaataacagatacttattcaattatccctaaattaatcaattattaactaaaaatgtattttaatcctagagaatattacttcttttctgataaaaccaaggaagaattaactgcttattcatccccattctttggaactactgaatttattgaagctgatgaatgtaattacattaaatttaataaatgtattgtctctgttgtttctcaaaaagctattagaacccaaatgtatttattatattgttggtcattaatctattattatttttcatgtaataaattgaaaactatttcatttaataaaatgttgtttgatgttaaacctgtcatgtttatgccatctgatgaagaaattaaattgtatatgtctaatcctaaattcttatgcagattttctgaagcaaattatcaatattttcttcaattttttgatcctaaaagtgtttgtggtaactttcaaatgagtttaattacttatgataaggatgattcaccaatgatgccttatttaaaaccaaagtttttaaattctatgaaactcaaattttcgaaattgctccatttaaatgataaaccgtttggttgtaacactgttgatgctgtcttgaataaattcaaatttaaattaagtgatgttgaaacttgtgaagcttattattctgatgatttttatgaccataaaatgcatgaatattcaacatattcagattttgtgtatgttattttaactggtcagaataattatttccctgctaaaccaaatcattttagtaaaccaagaagtttcaaacagttggtgaataaaaggaagcaaaattttaaaaatattgcacctttattatttagaaaagtaattaaagttaaaattgctaaacctcaaagaatcaagaaaattaacaaaaagaaagaaataattaaatcaagaagaactgaaactaataaacttgaaattgttccagttgttgaaaatatcgaaaaatcattagaattctctgtcccagttgttgaaattattgaaaaacaattacaattatttgtaccattacctcaacctgttgttgtcgattctttagacactaatactcgccattcatctgttgtaaataaaagttatgaaataattaatatgcaagctgttgatcatgaagattatgaaataatggaagtcctttctgttggtgattctttggatgttaattattccacttcatctgatgaagatgataaatttgataaagttcatgaaatagttaaaattcaatctaaatctgattccaaacagagtttatcttcatgtgtgaacttattttccagtccagttagtaatgaaaacatcaatcaaaattcattgactccaattcatattaaatcaaatgaacttattattgcctcccacaatgttaatatgaaaccaattgataaaaatgatgattataataacaaattaaatcctgtatctgcttcttcaaagaaatccattgatgccactaattccaatgatatttcccctaaaattacttcttccatctccaatgattttgataaccataaccatatttacattcaatccaccattatggaatcaaaatcaactcctatcaaatcattagactcacctatttacattttttaccacttattaaagagcatccttttcaatttaatggtcagtgtaggaattatagcaatgcttttattatttacatttgaaaaatttacattagaatacaatccagaaactttagaacaatccacagaaagaattgcaaataattttttatctgactttgaattgaatttttactataatgatttgatggaactccctgaagatgaagatacaaatacaaatacagaaacagaaacagattttaatttgaaatttaatcattcagattttgaagttgatgaacttaacatgaatgaagcaaaaatgaatgaatttgatgaaaagaattgctcaattatcgagattgatatttcaaactctaacacaaactatgataacttacaaatgtcatttattatctcttatgctgaatacagaatatttgtaaaggtccaaccaatgttttatgaaggtgatgttcataatttctttgatacaacaataattgaaggtgattatatttacaagattgttaattatttcccattagattactcacatgatttctattatgatttacaagtaattgtttcatccaattttgaatgtttcaatacaattaaaaatttactgctgaatgactctaccaattattattcaggtgaagctgatgatcaaattaatcaaattgaatggaatgatgaaaatatggaaaacaataatacttctcaactgaattttaatttatttaaagttggtttaattgaaaagaaaaataatatcaatatcaaatatttttttacttcacctattgaatattatagaagattttttttattaactgctggtcaggaaaaatttaaaaatgataaaaatatgatttcaatggtgacaaaaatgaaatgtaattatggatggttttaaatcaaaattaataaattttcttataggttttatgatgtgaatatattcaatattttagttatattaataataataaaaaaaataaatcaaaataataataataaaataaatcaaaataatgataataataataataataataaaaaagataataaaatgaaattatctctttctcttctttctatttccttttctcttgtgtaatttttataatattgctttaaaatgtatttgaatttttttaaactacgctgtagaacttataaaaatgagttacaatcttataattgtatattacttacatttagacattgattctccaattaattacttaccattctaccaaattcatgtaaaagcaaataaatagttattaaaagttataaatagatagtacaaacattaaaataataaaatcaccttttcatgacttttcattaattcacttatagtttcatcactttcatcctctttaacattaattataaccaatctatctaaattctgacaagttttatcagaaataatgaaactaccaataactgatttacctgtctcagttaccattaattgattagttttattaattaatgaaaattcaatattattatattttttctcattttccttgaatccattgtgaaatatcatcatttatctttgattctaatgttatattatcgagtataattctagccttatgtaatcctttacccttaattaatatacttaataattttaatccaagtatatcctttttagttaatttagaattatttaaatataatgtaactgaactaacatcaaatgctgatggatttaatattgtattctctgagaaaaaactcattgtttcattattaatacttttagcaatctcttctttatttacttcattaattgcattttcatttatctcttgtgtattattgataaaatattgctttattaaattggaaattcttactacttttaataatagtagatattttatcaaatgaatattgtttttgagttattggtaaaattaataaatcatttttacaaaatgttgaattatcaaataatgtttgagcataattttcaggtaatgaatataatatttcagatgtaaatggaattttattatatctacaaaagattttgaaaacacttaaaattgaatttaatgaattataatcatgatcatgatcatttgatgtttcataaagcattgatgcatgtaaaatatctgctgttctctctgttaaagttttaagattaattgcatgaattggtactttagcattttctaataaaagatctaaaattaataaatctgttgataaactttcaacatcttcaactgtcagtataattttatttaatttgaaattttcaatatctttaccatttatacttgtaccatatatttcatcatcaatatattcatcatcactatcattatcatccatgacttcattattaatatcatcagtttcaatttcagtttcattttcatctttaagtttctttgcgttaatcaatttttgtttctctaataatcttaattgaaccttttctttataactatcaggataacagtaaattgttaacggagttgttaaaaaagttgtaattaatgccataaatataaacattgaataagttttctgtgttataattctagcattcaaaccaacttgtaaaacaacaatttcaacaatacctttacatgacattaaaactccaactgttaaactttctctccaatataatcctcttaatttagctgcaatcaaaccaccactaattttacctaccattgcaacaccaattaatccaaatgcccaaccccaatctaatcctttatttaataaacctaaatcaacattaagacctgcaataccgaaataaacaggaactaaaagtatattaactaaatcttcaattcttgaagttaatttaataacataatcattctctcttggaactatacaaccaacaatgaaagctccaaaaattggatgaacaccaattatatcagtgaaaaatgccgatgaaaacattaataaaagtataattgtagttgctaatcttgaaggattatttggatcatcaaattctttcataatatttttcaaaaggtaatttaataaaattctaattgggaaacaaataaataaacaccaaccaattgcaactaaaacaatatataatgtaactaatgattgtgaagaatttgccaatgtaatacttaaagctaataaaacccaacctaataaatcattagttataccagctgctaaaacaacagtcccaactctatccttaactaatcttaattcagttaagattctaactaatacggggaatgcagttatacacattgcaactgcaatgaaaaccataaatgttgtaaatttaataatcggtaaaccttcagcattttctctataatctttccataaaccaattgcacatgcacaaccaagaccaaagggaactgccatattaaataaaccaacacctaatgctgtaactatatgcattttaataaatttaacatcaacttcacaaccaacaatgaaaagtaataaacaaataccaatatttgcaactaatgttaaaccaggtattgattcaggtgggaacatatatttagtaaaattaggtattctacctaaagctgtatgacttaataaaatacctgttaaaacttctgcaataactcttggttgctttattttacttaatggaatatataataattgtgaaattgtaacaataactataagttgaaaaaagaaaatagtataaggggaacttgaactatattcaagtgggtccatccctcctataataccacttgtactaccagccatacctgtagagatagataaaaagaagataaaaagaagaaaatgataagataaatcaagataaattaaattgtacaagcctcgtgtacaaaaattcatgttgtcgagtcagcaatttatacaatagatgttatacaagttatacaagttataccacttatgctatttgatactatgatctattggttaattggaccttctgtagtttagtcaatctcttactggcatttctgaataaaaagataccaaataatgtagatccaagtataacaatgtaaaaccaattatccttctcttcaataaaattctctaaattcataccataggcagctgcaacgaataaaagacctgccatacacattaatgtaatacttaaatttaaattaagtaacattaaatcatttctattagaatctaatataatatttataatttcttcagttgttctaacatcattaactctactttcaattgtttgaacaattgcatcacaatgtaatgaataagtttctaaaattaattcaatttcttgatgatcatcattacttcttcttaaaccattggttttatcagttaaatataattcagctaaatcttcatcttgatctaacatttcatcaattaaatcacgtattaatgtggccttttgtaaaaattgtcttaatttttttgaaacaattaataaatattttaatttggctaaatcaatatcattctctagttcttttaaaattccattaacaactgttacatgaatttgcatttcaatcattaaattatcaattacatctgcaaatattgtttcaagtgctttaatttcataatttaatttatcatcttgttgttgttgttgttgattattctttaatttatctgacatattttcaattaatttatcatctgaatatgtaccatgataattaaataaaacaacagaatcagatttaattaatgctttaatatgtaatatacttaataaaatacttttctccctaataacaattaatggaacaatatcatcatatcctttatcaattttacgtaaatctcttggcaataaatcatgttttaataataattcagtcttttgtgcctctgttgacattattctatatctaccatctttatcaaataaaatacattttaaaactgctggtgatgttaatgcatttattgatgatgatattcgattatcagctgtaaatgttgaagattgtgaagatgtagaattagtatttaatgatgattgagatgccatttcctttgtcttcattgaaatattggaattactttgatgtgatgaaactaatgatgacaatgcctctgatatattatcatctatattattactcttatcattattactactggatttattggtattttcttggaaactttcattgatgctttcccgtatttcatttaaatcctttttctcttgtgctttatcactcctatcactgtattttctgtagaatagagttttataactataattattactataactataattatgaatataattactcatgtgtatatttcgtcgtattatatttgtttgattatacattgcagatctgcaagagttcccacatagaaatgccaaacatctccgcattgaatatgacgccataccagataccgttcttaccatatacactactgaatgctccacttataagatagaaggaagaaagaaacaatcccaatcccaagggtatacccttcaaaaaagtgaatataataaaatttagtaatcacgaaaacctatttgtttcatattacttacaatcatgttcttctttctgggatcaacactataactggattcacagttatatgaactttagaactacaattacaaaattacattaatataacatgtcaagaaagttttcagcagatcagttccatctttcaacagaacttggtaaaggttcatttggtgttgtttaccttgcctgatgatttaataactcataaacaagtggctataaagcaattagatttagaacaaacggatgatttattagaggtacagaaagaaatattaatgctctcaacttgtattacatgataatattactcgatattatggttgttttataaaaggtcataaattatggattataatggaatttttaagtcttggttcatgtgcagatttattaactgcaggtccatttagtgaatcaattattagttatatatgtggtaatgtattaaatgctttagattatttacatgatagtggtaaaattcatcgtgatattaaagctgctaatattttaattggttcaaatggtgaaattaaattagcagattttggtgttgcaactcaactttcaaatattttaagtaaacgtttaacatttgcaggtactccctattggatggcaccagaagttattaaacatgaagaatatagttttaaagctgatatttggagtttaggtataactgcaattgaattagcatatggtagacctccattaactgaatttaaatcttatgaagttatatttgaaatacctaaaggtccttcaccttcattagattcaggattttctgaagaatttagagattttgttgattgttgccttaaaatggatatatcagatagatacacagcaaaacaattattattacatccatttattaaaattggtaaaaaaattaaaaaaattgatattcttaatttattagataaaaaattaaaatgggatttaggaaattggtaagaaagcaaaacctaaatatgtaccaactgaattaagatctgaaaatagtaataagaataagtctaaatcatcatcaaataagggagattcattaaactaactccaatgatatacacagcacaattaaatgggatttaactttagatcaaaatgatgatggtggtgatacacttaaaaatattacagaatcagttaaacaactaaatatgaatccaaagatgaatattgtaccacaaagtccactaaattatgatgaaaaattaaaagatccaatacaggaacaaaaagaattagatatgaagaaagaaatgattgttatacttaatcaaacattttcaaaagtgtctagtaaatataatcttacaacgtctcaatatgatcaattagttgattttgaaaatcaattaatcgattcatttttcatgaataaagatgatagatatagagatatattcagtaaattttataaaatattcatcaaaagagttatgagaactgaaaatgaatgatttgaaaaaacttgtattacctaaatattacttatcagaagaggcagaattgaaacagtttcgtgaagttacaggtaagaaagctgataataaacaaatattaagagaagaatggacacctgaaccatcaaatagacataaaaattattgaaaaagtataaagggaaattcctatacattatatagaagaaactaaactaaactaaaatgcaaacaaaagaactaaagaaagggaaaaaaacaaactattgtaaacgattatcaggttttttaaataatgagttaagtcttgaacctgcaaacttcaatttttcaaaatgagttgaaagtctttccatttcattattaagatcaccaaaagtatttacaatctttgtaatttcaacatcatcaaaattattcttatatttttcaagatcatattctacatcaataattgaagattcactgtgacttttacatgatgctgtaacaagatgttttttgaatttatcgtatgcaccatgtgtgaatttttcaacttgagtttcttctggtttattatcaagacaatcatggaattcatcattatcaagatggctgaaatcatcattaaaatcagtgttaaaatcggtgttaaaatcgttattaaaatcattttggaaactattatcaacttgttcatcagacttacccttgaaagaaacatttcttttagagatgacttacgactaattgatgatttacgactacttccttaggtttcttttcatcacctcttacaaccatagtttcaatctgctcttcctcatcctcaaatttatcaatgattttcttagcttgcttcttttctttcttgaaatcaatatcaccagttttttcatctttaattggaacatatttaaagcttgatttaccatttctaacaggttgttcatcatcatcttctaacatttgtttcattctttctctcatttcagctctagtttcaagaacaacaacagtaccaactttagatcttaataaattgaaaatatcctttaacattaaaatatcagttgaagttaaaattttagaaaatcctaaattacctctaccttcaaattttgataaatcagctaaattatttgcaattttaattaattcattttggaaaagtgaatatgacattataaattgtgttaaaataattgcatatttatcaccaaatacattatcagctcttttatcagattcacttttagctaaatcttcatgattttccctaatatttttatcgaattctgcaaaactgtcatcttgaaattcaggatgtgcatgataccaattataatatgctgttaataaaggacgtgtcttaactttcttcaaatgaataaagacatgtttaatatgatttttaactgctttttgattagcacgatcaattttgacatagttaagtttttctactgcttgcattgttaagatgtttttttttgttttgtttggttgaagataagataagatagttaaaagtggatgttgaaacttaggtactttaccatccttttatagtatttcaattcaaccaactattagggtggcttgattttgaaattgttgtgataatctaatgatttaactaattactgggttttactttgtgatatatcacatttctacaacggaatgcattgctggtttacaatttccccaatagtagaagtttatcaacaaaagttgaacagatgaagtttgtgatacatcacatttccaaaaagataagcaacaaaaaaagatagttacagaccgtgaaatgattggtttattctataggaacattatataaaaaaataagaaagacgtagaagaattacttgtaaattaagattacccaatcttgcctgtaattcacgaatgtgatcaccctttgctgaactttcaactgaagatggttgtaccagtttagcaggtttaacaggttttgccggtttatttgattcattaataacagaagagtttgaaagtgatgtaggtttagaaggtttagcaggtttaccaggtggaattttctttggttttcctttaactgctgattcaagctcattagatgataatttagcaggtttaggtggtggttgctttttagtaaatgtagttgtagatgtagttgaagttgatacaggtggtgatggtgaacttagtggacttctatcatatgtagttggtggtattataggtggaggtctattgtcgtatggtggtggagcaggttctttagctaataatgaatctgtttcagttgaatatgatggagtataagttggacgtgctggaggtggaggattttcagtttgtggtgatttaatagattcagttctttttgcatgagctaatggaggtggttgaatttgtgaaatatcaggaagttcaaatcttctaggaggtggtggaacttcagcttcaggagttacactttctctttgaggtagggatggaattggtctagtttcagaagttgaagatgattccattgctgctgctgatggtttggaattaatattttcctttgatgtattaacactacttgagaaactacctaatggtgaaatagacttacttgtagtttcctttgccttttgtaatgaattttccttaatttgtttcaatctttgagcttcagctttccttctctcaattttcatttcttcatccttcgttaatcttgccttaggtggtggagcaccatatttggataaatcgaaatccattaaatttgtcttaaatttaggttcagttataacttcttcaccaggtttttgtaatttgggatcttttggtttttgtgctgcataatctgctggatcataaggtttattttcaggaatgttattattttgagatgcagttgaaggtacttgtctagctggtggttccggatatgccaatgaagttgaaggtacttctctagctggtggttccggatatgccgatgaagttgaaggtacttgtctagctggtggttccggatatgctgatgaagatgcaggtaaataacttggttgttgttgttgttgatattgcggtaaagctactggaggttgtggtaattgacgagatggaattggtggttgtgcaggtggaattgtttcttgatttggaaatccgtaagagtttaattgagaatttggatttgcgataggtgttgaatgatatggttgatcatatgatagaacatcaggtggagtagtaccattatgaggtggaattgttgaatattgattaacatgagatccataactttgtggtggataaggttgagaatcaacacgttgtggttgtgatggaggaacagaaggaggttgatattgtccatagttttgctgtggaaaaggttgagaatcaacacgctgtggttgtgatgggggaaccgatgaagactgatatggagttggttgttgaggtggaggaattggttctctatactgatgttgatattgttgaggtggttgtggaggttgaggtggttgcggtgatagattgaggtggttgttgataagattgaggttgctgttgatatgatgattgagaaggatattgttgaattggaggttgtgacacttgtccatattgaattggaggttgttgatattgtgattgatattcctgtggaggtggaactggttgtccataagatgattgaccaacaggttgaccatattgaggttgtaaaggttgttgttgttgttgataagccatatttgaattaaaactttcagctttaccatatgcagcaacatgatgaggtggaggtggataagatttaggatcttgatacctaattggagcagaataacttgatctattaccatctgactcatcatcatcattatcattattaccaccctttgatttattattatgatttttataagcggaataacctgcctttgaaacagattttgtagctctaccagcacctttcagtacagagatactacctgacttgattgagtccttgttattatcccagaacgacatctattgttgtataagaagagataaaagaagataaagttcattaagttaaaatcttcaatatatgaatattttatatccgacaaacaccgattacatgtttttcttctttgtttacatttgctttttacagtgtttattctctggtaaagtaagaggaatatgtcgaagatattcatcaaccatacgttcaaatgtatggccatagatacatttgttaaagaggaagatcgaagatgatgaaaatgatggaaatgatgaaacatttgatataattcaatacatgtgttcagatgttgaaagtttatcaactaaaaagttattaaatcaaataagtaaaactattataatgaataatatgtatacaggtattaatagaaatacacacaatggtagtttaataccaacaaattccaaacttttctcaaatggatcaaatactaataatatacctgaaatttcacttataagggattatcttgaagttaaattaaagattgattatttaaatgaggaagaaatggagaatgatgatgtagaagaagaagaaggagaaggagaagatgaagatgatactgaaaaattaataactggacattttagatttcatttaccaccaataataccaccacaaattataattttaattaaatctccaataccctaataaattattattattttttcaaggtaatattaaattcctaaacattttcacaaatcatattcaaagtaaatttcaatgtgcaataactgatatttcattaaataatttattttttgaaaaatgtttaaattggtgtattattaatgataaattaaattctataggtacattagaattatggtttggtaaattagaaacaaagggtaaattaggtagtataataattaaaatagaggaaaaggatttattgaaattgaaaagtttggttaatgataacgaacgaataacttcaatactttatgaatatttaaaacatgaaactagtatattatttgagaatctaccattaattaagatacgatgtcaattatttacaattagtattgatggtaaaattaaattttcaccattaatgagtcatttaggtaaaacagctaaatcattaaagaatgatgaaaggttaagtatttggtggataattcgaactttatcaaacaatatataacaagttaaataatatttataaatacatacataaatacatacaagattatttttcaggtggatttaatttttcaagtttttcaaaatcaacatcaaaactactaccacaaccacaactactctttgtaagtggactctcaattactttaaaaccttcaccaattaattctttaacataatcaattttagaatctctcattatctctaatgcatctttatcaacaattaatttaccaccattacgttcaaataatgaatcattattttcaggtttaaattcatcagtatttgtaatttttaaatcatattgaaatccatgacaaccacctgatgaaacaactaatcttaaagctaaatttgatttaccttcttcttcacttaatttatgtaatttctttgaagcagattctgttattgctaattgtaatggtaaattattatattgacttaattgttgattaataatctttgtagctgtaaaatctgaatttttatctaatgataattttttaaattttaatggagttgtaggtgtagttgattgaaaccttatctgttgttttaatatctgtataccgtatcttttcatcatattctcttattggttaaaagaacacattcattaactatatattactaatttaaataaaatttcgggataaaaaatatttcaacatccattccgaatattacataatacatgctatagaaccctatatatacactatagacaataatatacaactataaagcttaataaactaccaagtagtaatgaaacattaattaaaaatgcagtaaatgaagcagctgcctttttctcaacatctgtatctaataattgtccaacattcatataagcactactaaataattgaccatttgttataccaaacattaattgaataaataaataaccaaaatcattgaaaatataacctctatttttaatatttgaataaaggaataatggtataaataataatcttaaaatggaataaatcattaaataattatttttttcaattataaataatttaattgcacataataatctaccaattaaatcaccaatattccaaataagaaatgctaatggtacaaataatttttttgaaatattatttgttgattcaatatttgatgcaaaaactgggaaaattaaagtaattgaaaatgtaattataattgttaattcaacaaattttaattttttccaaagttgtttaaatgtaataaattcatcatcaggtttagttatttgatcaagtcttaattctaaatattcatcagttgtagtatcctataatttcattattatcagtttcattgaaaaaatcatcaggtatataaattcttttctcataatattccattatataaaataataattgtgcaaataatgcaattaaaatacttgttataaaatatttaattgcatctaattgacgatcttcaatattaattttaatttcatccttattggaagaagaagttaaagatattttatcatttgatataactgccaaaatcattgaaattgatggtaaaacacctgaaattgcattaccaacaacagttgcattaacaaatattggtaattgcatattaactaatgccattatccctacctgtgttaaacaagaaccaattgaagtaattaatatattaatcattataaatataaaataagaaataacccaatctatagggtataatataattgataatgttaaaattatgaaaataatcatttgtaaataattaccaattttaataattaatgaataatttataaaattttgaattttatttaaatataaattaaataaaactgaagttaatgttgaaattgtcatcattgaagatgaataattatttgataataaaggatatttagaaaatctatcttgaaaataatctgatgctgataagaaacaattccatggccataatgatgcaatacctaatattaaaaatgtaaaatattttaatgttgataatctaacaggtacataattgaaaatatggaatatgatagtattatcccttgataatattaaactttgatccaatacctctctcattatccaataaagaaagttacattaagtattattatcacaacattaagaaattagaaattcatgaaaatcttgaaaaagcagaattacctaatcgggaagattttatatcatgcactttcactatcagaacaacttctgctaccattttattatacctttttacaacttcaatatattctgttatgacatctataatactataaaaaggttagaaagtttatattaatagatattctactacactttttcttcttttggaaatgtcattcccatttcctattatatcatacactggtgaaattatcaacgtaacagattctgaactgattgatcttgcaactgaaattgagaatttccccttattggaagatattccaaataatgataatccattatacaacatgaatgaatattcatttgatagagaaatggaacaagaattttattttgatgaaaataataaatcaattgaaacaaagagaagatttagaaatttaaatgaaatttcaattgatagattcattaatgattatcatttagttccatttggattttcatattatgaaaattttgctaaaaataatgaaattccaaatgatattaaattcccaaaaaatttatcatttcaatcaaaattattatcaattgaaaataatctttcaccttataatagtttaattagtccattaattaatgatgaaatttggaaattaaattataatgatccaatatttacaaatgatactacaccttcaaatagatcatttgcaagtgatttaagtgatgaaactctttataatgatataagatataatactaggggtcaattaacacttaatttatttaataatgaaacaattaacttatcatcatttgaatcattaataagtgatgatgatatttattggtcaagaagatttttaagacatcgttagttatacataaaagcattaatatattatataattgagaattctcttaaaatattttcataatcaaaagcagttataatcattcttggatctgattgatcatttaaatttaatgtaccattaactatatcacgacgtaacattgattctcttgtatataatataacatctgaaattcttggtatcaagtaaattctcatatttgatttataccttggtcttgcaatttttttcttaaggaaagttgtagttatttcatcatttaaagttttttccaatgaaaaaggttgtggagttggtattatatcaatatctgtactgttctcacctccttcattatactgtttttctttttctgtaaataatttatataataatcttaaatcaaattcatcatcatctaaccatttatcatttggctttgcagtttccattttaagtacaattgcaccagttttctcaaatgctgcagctcttgtaattcttaaaaatgtaaattcctctaatttaaaaatttccttaacagctttattaattgatttataaacaggacaattgaattcatctaatccaattgaattagggaaaatattagatttattattaataaatgatgttaaatcattattattatcattatcatctaagaaagtaacagcttgagatttaccagggaaaattgctcccatatttgtagaagtatctattatattctcattattactactagtatttttaaatctccaatctactgcttcatcaattaataattcatcataaattgttctttcagataagaaacctctctttaaaactttaaatttatttttcatttctttatataatggaggttttgaaaaatttttaaaatctgttaaattcattgtttcagtaacaagcattgaataaagtgttggtaaatttggtattaaagttaatctaactttagttaaaggagttaatggacgtccaattgaagtaattttctttttagttacttttaaagatgaagaagaggacttatttttattatttaattttaattttttcaataattttaatctaatttctttaaattttgtattatctgaaatattaagcatacttatatctttatttctatgagctaatttaaccatttgaggtacttcattaattatttggaatttaggtttattgaaaatatataaaggaggatttggattagttattaaaattttagtattagatggtgatattgaagaagttaatgaagaagtggaagatgatgatactgttgaagaagatatattatttgaaatattattaagaaatgatgttaaagaagcatttaaatctaagttagtattaaatttatcaatatcaattgtatcaatattaatatcaagattattattattattagagtttatattagtattatttattggagtattatgtaacaagtgattttcagataatgaattaattaacatataatcattgatgttgttattaacattaatattattgctattattattgctattattattattattattattatttaattgatctgataataattgtaaagataaatgatcattatagggtatatagtgatcattcattgttgttattatcctaataaaatcagttgaaaaaagaaacagttaaatagataaacagtttagtaatatatttccaggatattgtacttagtattaatattgattattaccttaaatggaatattaatagataaggcacgtgtattaattatttcaatatatttgattacgtaacagtcacgtgattactattctgtattacgtaatatttttattgaagtacttacgtaattgtataccacttacgtaatatcaaattattgtatcacgtgacaattacgtaataaattatttttataaatataaatatttttagagtggacacattgaaattgaaaaaaccattattaacattacgtgttttgatttatttattaataacaaggaatgcttctttctttttttgttttttgtttttagtatatttaaagatcattattcaataactatcactaaataataatgaacagattatcattaattatatattccttaatttcattattatttattataactccatcatttgctcatattgctttattacctccaaggggtaaagaatgtttttatgaaaatttgaaaaaaaatgatgaattagctgttactttccaagttggtgatagagataaagattcaacaaatcaattaaattgtgatttttatattaaatcaccatctggtaaaattttaaaaaatttaaatgatgttactcatggttcaattcaaattaaagcagaagaaaatggtaaacatttatattgtttctcaaatgaagattcaagtttgaaaactaaagatgtttccttcaatgttcatggtgttgtttatgttgatgttaatgataattcagatgataatttagaatcaagtattagaaaattattagaattagtttatgatgttaaaaatgaacaaaattatattgttgttagagagagaactcatagaaatactgctgaatcaactaattcaagagttaaatattggtcagttattcaattaattgttgttatcttaaattctttatttcaagttttctatttaaagagattctttgaagttaaatctgctatataaatttattgataatataaattaataacttattttatttataaataaatacttgtttacgtaatcagccatgtagtttcataagaaagagcaaattgaattaaaataaaatgaaatggttataaaagttaaatagagtagactaagcagatggagctaaaaatccattatttgcaaataaattttgacctgtcatccatttaccatctttaacaataaatttaataattggaacaatatcatcaactgcagttaatcttttttcaatagcttgattttttaaaaaattaattctaccttcatcttcttttccagaaaggaatggtgtatccattggacctggtgaaatacaattaaaagtaattttcttttgagtttcctttgaagcagttttacacatccaataaacggcagctttagaagcttgatataatgaaaaaccttcagtataagcacttaataaagaagttgttaacataacaactgaacctttttcacttaattttaattcagaatattttaaaaataaaaatgatgctttaacattaatatcaaacattttattatattcatctaatgaatttgtaaataaatggttttctaatcattaaaccaacattattaattgcataatcaattttaccaaatttttcaattgcaatatcaaataattcaattgttacatcctcttgtgataaatcaccaccaaatgtaattgccttaatattataatcattaattaataaattagctaattgttcagtttcattagcagatgatggtaaatgataatgtaataaaatatttgaaccttctttggcaaattcaattgcagtttgtttacctaaattcttattagcacctgtgataatagttgatttaccgttaaacattgtatattgtctacagagagaatagaaataaagaagaatacttaatatataaagagctgctaccactctttatttaaatattcaaatgtaaactccgatcctccgcacaatttctggaaacattgtcatgaaatggcataatttgtggaattaacatggaattaacattaaatacagtttctctattcaaatgagattaactagtaatatttactaaccaaatgtatatatttattggttaagtccgttgtaactttattaattataaatcttaatataaaattatctccgtaaataaatgataattacgtaataactccgatgcttacataagaatcattaattattaatttaatatgtccattccctctcttgaagaaagtaatgatatagttattagttattttcattgctttcttcaactttcccaattacaatcagatcatcgacttgattaaagtatattatattgtaatagattagaagtcaaaaagtttttaataatttctctttgactcttaatctatgataacaattctttaatcaagtcgatgttggaattgtattttaccagttaatatttttattagataatttgttatttaaattgttaaaaaattcttgaagggtagcagggaagaaattgttataaatttcgatccattgtggagtagattcagctattttagcgtttttgaaggcatcccttacgtattgttcaggaagtagactaagtccttgtttgatgatttcttgtgaagctgtaggacagctgattagtttgtgttcttggtgacaatgagaacattctttttttctaattggacattgttttttgtggtgattgagaaccttgcagtaagagcagaaacgtaggggggaattgacggtggtagtgatgttatattgttcgtcatatagtgtgacttcacaagtggttggagggactgagtggtgttttaaatcaatgaggacatatgcggatttaattgtggaggttttaaatggtatgtttattggccttttaggcggtttggaaatgtggataatatttccaaagtttgagtaaagttgttgtgctagaggttctgcaagagagtctctaacataagaaggatagctcatttttaaaatgacagcgttaaaatgcatagaacggttaccaataggggtaaaaaggtttgaattttattgaaacgatatggacgattctattaatccatggatatcctgcgactcttcagcataataaattgcagcattcaaggtatgtggtttttgttgagataccatcttatttaattcaggtgttaaaccaagaagatatctggaaatttggttctttggagactcttcacggtctaacttccttcaaggtaatctttaaattggtcagaataagtagtaactttcattccctggagtcatcttataagtataaatcttaaaatctaaagcatgcatatcatacaggacaaaattcacctaattgatcaagaatcaagagttttgctgtttacatactcaccaaggctcatataatattgcaatttgttcagcatataatttttttattatttgatctgtgttcccaccgttatgattagcaacagtaatattctgataaactcgatacccactttctctattcttttcataacattcttcaacatgaaatcaatcaacaataattattaatttaagatcacaaccattaccactatataagcacttctttttgacattcgaaatcatggtacaaacgtgttgaggaatttataagcttttattaccatctctttcactgtttcataaatcaaagttttcacctgatctaatgaatatttgacattgctagggatttatatattattatttatcatttatataaagatttgtatattgaatcaagatgagccgccatgatattaatatcaatattcataccaaaactcatcaaaactcatcaaaactttcaagcatagataagaccccaacccaattggcctcatatcaactataaagtcatactgatcatgttaaaaagaaagaactgcattaaagtaaatgaaccttgtatacatacatatcaactcttatatactaaatatattacgtaatataaccagtacaccattattaatattttaatataatacctttaactaacatgaatacctcattggaagatgggatatatacctctagagatacatctttaaacatccacaacagacaaacatgtcagatagttctaatttcccaactgctacacctatagtattcacacctgcacttttatcatcccttgattcatcaactaattcatcaattacaagatctcaatcaaaagaacaatacttacaaagggaaatttctaataaattaaataatttaataaataatgaaaaatcaataatttcaaattcaattgaaattaatcaatcatctgaaaatgataacatgttaggatcacctgaattaaattcaaaacttgataaaattcataaaattttaaaatcatcagatgaagctaaaattagtaaatctaatgaattattagaaattgaagataatcttaaataattgtcttttacaaaataagggtaaacctcttaattgttgggatttagttcaaaaatttaaatctttagctggtaatccataaatgttatctatatagaacttacataccaactcctttatataataaaactaatgcagaatctccttcactaccaccctgataatgatctaattttttccttatcaacaattgtaacaatatcatcattaaatttataccatctatcaccacttaaatctttatcatctttaataaatgcttgataatgtcctgaatctgcacttgcaccttgatgtgcaataactccaattaattcatataaacttgataaatttgaaccttcattatatcctccaatcttcttctttaattcttcaaatttttccttactcttaatttcaatttttttcatatcttcaatttgtttattatattgttccctagttgttaatccttcacctaatttaatttttttcaatgttctaaattcttcctcaatttccttttcaactttataaatttcctccctagattgaattaatttttcacgtttactttcatcaattaattccattacatctaattcaaatgggaattgaactttacgcataattttcgcctttttaccactttcacgtttccaataaaatctaacaaaattaattgttaaatattttggtaattcagttatctttctattaatttcatattgtgcattcctacctaatctttcattatttttctcaattttctcctttaatccattctttaatccatcaataagaaaattaatttgtccattaatatgacaattcaatttcattgaatcttcaatatcatatttaacatcagaatcatcttctgcatcattactctctaaacatttagtttcactcttcatttcaattttaaaatatttctctaaatctgggaatttctcaattaaaactcttaaaatttgtgaataagattcctctgcatcttgttgtttataaaatccttcccttgatctttcttgaaattgtgggaatgcatctctaacactacttaaaaaatttaatggagtaattttttcacctttagaattatctaatttattaaataattctttcatattattaactaaagcattatttttatcattatttttcttaacatcatcctttaattcttcaatagtatttaataattgtatactagaattcaaataacatgtattacctaaattggttaaacctgatggtaatccaattaaattactattaataatttcattatcattattagaatcatcaattattttatcatcattttcatcctttgtaataacttcacttaatggagtacctaacatcataataacttgattctcacgtaatgataaacttgataaaattgcatcatcctttaatggacctccacgtactaaaattttttgtctatcagttggtacattagttaatttaaaaatttcttctttaagtttaataccagttgattctaaatcaacattaatatcataaattttacctgaatgtttaatcttaattgccaatgacattgtctttgtctaaaaggaaattattccaaaagaaagtaggatggcaaaattgtaacaaattctatttaactacatgaaatacgcgttaaagaaattccactatatatttcctaattaagtaactatttcaacattcttacttatatcaacaatttcacttccattaacaggtacaacagtctctgtttcaatctctggcatattaggttcaggtcccattgatattccattagttggattatcaatatttaataaatatcttaatattataatacaaccatttttagataaaactaatgaattttcactacattgaataccagcacaacaaattggacatccataagcacaattacaattttcaacaattttcaatgattcaatcattaattcttcaatacattcaaatattcttgaacttaatccattaccttgtttaccacctttattatcaaatattataattcttgcaggtctctttcttttactatctcttttagcaaattccttttcaggtgctttacattcacatccaatttcatcaaatcctccaatagttataaatcttggtataatattcattatagaatgttcaactgcatgaattgaacctgctaaattaagttcatgatttttcaaaattttaattaattcaattggtaaatcaatccaaatacctttagatttatatttaacgggtggattattaacttcaacactatctaaaattttaccacgtttatcaattttgaaaaatccgaaaataatacttttcttaattatattaccaaaataaattggtaaatctaaattttttaaacttcttaatttttcaattaataaaggatcaatatctgtaaaatctctttgacttgttgtccaatcaacattaactctttcaacaattgcatatttttcatcaacattaaattctttaattaaatatggtaatccttgatgaatgaaaattccaccttcatataatgtaaatgttgtcctacttaattcaattgtttcaataatttcttgtctaccattaccaccagttatatcaacaactgcaaaattatcttcatcaattgatctaattgaaactaaaattggagggtgtggtaaatattgatcattacatgtccatttattattattattattccattttaatttatctctaattaaattttcataaatttcccaatttaaacaattccaccattttcgccattcaataattaattcattattatttacattaaattctttaaatgcacattgtaattgaccttcagcaattaataaattttttaaatcaatacataaatcttcccattcatccctttcaactaattcattaattttattaatataatattgactaattggatcattatttgcaattaataaacataaactatcaaaacctcttctacctgctctacccatttcttgttcaaatccacttaaacttatgggaaatccacacataattacaacatctaatccaccaatatcaataccaacttctaatgcatttgttgcaattatacatgttaaattaccattaaacatttgattttcaatttttcttctatcagaaattgaataaccacctctataactcattatttttttcaaaatttcaggttcatcctttaataataatctaatttctttcataactaattcaacaatttttctaactgtacagaaaacaattgtacgtatatttaattttaataattgaacaattattttacatgaatcactaatcatactaccaccattatctaaatttggattccaaccaattatatttctaataccacaaggtgaaccatttaatttttcatcaatccataaaattttttcattattataatcatcaattaaacctgtcattttacttaaatgtaatgaagcattatttaaagttgcagaacttgcaataaattgaatttgattattaccaaataatgaacaaattcttcttaatctacgtaaaatatatgcaacatttgaaccaaatgaacctttataaatatgtaattcatcaattacaatatattttaaattttttaaaaatctaatccaatttgaatgatttggaattattgttaaatgtaacatatcaggatttgttaaaattacattagaattatttctaataaaaattctatcatgctttgttgtatcaccatcaaatgttgaaattaaatttttatttatttgaggtaattctaataaaaattccataaatgaacgatgttgatcttgtgataatgcctttgttgggaataataataatgaagttgattcattattagttaataaagattgtaaaattggtaattgataaattaatgatttacctgaagatgttgaagttgttgaaataacatgtttattttcaattaaaattgatttaatacctaatgattgatgtgaataaatattttcaataccttttgaattcaataaatttttcaatgatgaatgtaaattaatttcattgaaaaaattataatcataaatagcatcctttgaattaatttgataagtagaagttgatgaattaatttgattattataaaaattacattttttcaaatgattaattatttcaggtattggtttatgaacagtttccactaattcattattcatttcatcaattggattaattaattttatcttttcaggtaaatatttttgataagatcttaaaatatattcataagaattttcacctatgtcttttaacaaaattccttaactctttcttaaatctattatcacgtttaataattaattttttaataatatcaggagatggaggtttaatattactttgatttctaatataaccagatctattacctgaatcaataaattctataattaaaatttgattattatttacttcatcagggttatttttatcaatatcgaaaatatcaacattttcactttgattttgtttaaaaccatctttccaagtaaaatgtttttcctctagtataaattgatttttatcaacatattcaaatataagattatgaggtataattaactttaatttagcaatatcatcataaattaattcatgttttagagatttataaatatgttccttaaataaatcaaatgatgttataatatgtttccttgttgataaaaatgtaaaatatgaaactaatttaaaatgtaaagtttctaagaattttaaatcattatctgaattgattaatgtatctattgataatatattgttatgtttctttccctctaatagattattcatcttgttataaaagaagtgaaggtagtataggaggaacctatgctgacataatataaatttactatattatattatactatacgaattatacaaacttaagagacaaaacttattcatcatcatcatcatcatcatcgtcttcatcatcatcatcagaatctaaattattttccatttcctttctctctaataaagcttgtaattcagcatcttccgttgctgtaactgcctttggagccattgcaatatcacatacaccaccataacttgtaattttattattaacaatttcaattgcattatttaaaatttcaatacccatatttttatctaaactttgagctgttataacatatcttggagctgcaactaatttaactttaatttgattattttcatcacttaaattttcagctaatgttaaagattctttaattgcatcaataccttcatatgagaaacatgaaacatcaatatctgctctacatttaattgcttgaggtgataatcttcttgcaatattttcctttaaatcatttaataaatcaattgaaggagattcaatatttgtagattcaaatattgaaggatttgtaattgaaattctaaatgcatcgaatgcatgaccatattctttagctaatggccaaacaattgatttatagatttcttcctaaggggacattaaatttttctgcacatcttctaacaattgaatgtacagcttttgatttattatatctttcctcacattgaacgatatcttcagttgaaacacgacgttttgataaatcaatataacctttctccttatcaactctaaggacaacagcaacttcatttctaccaactctaattaatttttgaattgatctaatacgtcttcttgataattcacttaataaaaccataccttcaatatcatcatattctaaaagtttaacataagcccccatttcagcaatttgttgaacattgaccatcacaacatcatcaacttccgggtatttgttctcatagaatctacaatgtgatacattcattatacactgggttacctatagaagattgtactatataatccttcaatatttcatgtagtgaatgaaaatgaaaaatttttattttccactattaaagtatttacttaacatagacgggtctacatacatacatagacattaaactaattgctttcttgaaccttgaaagaagaacttaacaacacttacttgaaatgctgccattgcaaccattagaattaaatcaaatagggaaaaccagaagattctgctctctgtggatttaacagttgattggtttctgttatttctagttttgtaataattaagtgaattctctaaaaatgttaatttcctttcaattttttcaactgataattgcatattttcaactgccttattctcctttggtgcatttggtaaattagccttaacattcttctcctcttcctcctcactggttttaatttcaaaatcaattactttctcagcaaatgttgacatttcattatcaaagcaaaattcatattcaccaatttgatcggcattgaataaataatctccttgtctttgtttctcctcttgaacaattattaattgatttggcgctttaatggtataattaatatcaaatgatccacctgcttgaactgcaaaataatatccaatattattatttgtattagtattgaatgcatagaaacattgtttctcattaggtgataatgtaaatgttaatgcagtagcagatactgctgtgatatagtataataatgcaacaataccgttcatcttgtcttgctcttaaaagaaaagactacaagtaaacatcaaataaacgccaaattcaaattttgtccacctgttaactaaatatacattacgtaaattataactattactacttaaatactgtatgaacaggtcttaaatagacactggcaatactacccataacaaaacacatctcatccactgtatcatcatctaaaccactgttagtattcgtactggtactgctatttctctttagtatctctcttaacattttataatctccctgacaactaatcatcagtctaatataataattaactcttatctctaattgtttacttattccactgatatctcccattatactaagcaacttatcactttcatatccaatatcaatactacttttaacaatacttgttaaataagtatcaaaaatatatgttttcttatcaattgtatcaccattcatacgttttattaatttacccttaatatcaactaattcttcaatcttatttaatctattcaatatccaaatatatgatataatatcttcatcactaatatacctattatcaatattaatatcattaccaactttccctaaaaatacttcaccatatttttgcatattcttttcattaacttcccttaatgcaattgatattgataaataatgtttatccattgtaatcccttcctcattgattaattcattcaacaatttttcaaatttttcatcatcctttatgattaaattacataatgttctaattgtcttatatgatatattatcatttgatgatttaattaatggtttaagttgtcttataatatattcatttgtatctttctctccatttaaacaaattaaatataatatctctaattttgtatcaataatataatattcaatatctttattttcatcaattataataaatttttcaattatttccttatattcatcattaatattaaatttaataacaattaataaaaaattccttaataaattaaaaaacactatcctatcattaataaatttttcaaacattctcttaaatgaaattataatctcattaactattttcatataaaatttcccatccttttcaactccattaagataataaataatacatttaatagtatttaccattattgaaatatcatcattatccttcataaatgattcaatacatgtaataacatctttacataattgatcaactttatcaatcttaaatttcactaacaatgaaataattgaacttgttggtctctcatttgtaataatcgtaatcaatgttgatacattaccattatttaattgaatcctttagtactatatttttcaatttctaacaaagtatctgcaattgaactaataatttcataatttttacaattattcaacaatttcattaatttatcaaataataaatcaattttatccttattcttattattattcttattattattatctaatttcttaactaatctaatacatgaatgtataaccattgtatcatcatcatcattacctccatccaatttatcattaatataatcccataatacacttacaacttctttataaatatcatcactaacacatttatcactaatacatgaaagtaattctaatttactaaaacattcatttttattcaaatattcaatcaattccccaatccattcaaaattttccttaattatcccatatgaaccatttaatctcatttctaataaattataatgttaattgattaataattttatgatcattatacattttataacattttaaaataaatgaccaaataatttcatcatttgaataaatatcaccaattgatataaaatttgctaataatttctttaaaataccaattggtggatgattaaaactaatagatttaatttcatattggaaatcatgatgtttaataggtatataaagtctactatctgacatttactaaaagaagatgtaggaggtaagattatggtaaaatgcggataagatgctatatgttgattatataataaaataaaataaaagatagatagatagatagatagatagataaataaaataaagtaagagttaaaatacattataaatacattaattagtaaacttcattaataactgatcctgatactgataatgaaacagatctagaatgattattcattgatgatgctctatcaataaaatcttccattggatcataatcattattattattattattagtatgattatgattattattattattattattattattattaattatgtaataaagataaattaacatcatttaattcattatcattatcattatcaattgaaccacctttccaacctttattaattaatgataataataattctttaaaaattaaattccaatcatttaatgtccatgattcaattattgaattattaatatttaataaaactaaatcatttgcagattttttattaatataaaaagtatttggtaattgtggtaaaccaaataataaagaatttttatcatttcttgatgaaataaatttttgtggacgtccataaagtgaaaatgaatttaaaattggtattaataatcttaatgaaatttcacatggtttaacacttgcatgattttcaggtataatataaattaaatgcgatttaataattgattttttaattaatttttttaggagttttactattattaaatgatgaatctgatattgttgtatcaattgaactaactctttgatgtgtattaattgtattatctgatgtcgttgtattagtattatttgaagaaacagatcttaatgaactaatggaaagtctcttagataatgaatttgatcttgatcttctacgtgatgatgatgatgatgatgataataatgaagatgattttttctttaaattagttaatgaatttgaatcattatttgaaattgtttcatcattaagtataatatttaataaatcttcattaatataacaattaccaaataatcttaaaagtgaattattttgaatttgtgatggatcattaggataaattgtataacatgattgaccatttttaattgttgataataaatttttctttgatttattactatttgtataaatttcaattttatcattaggtttaataactaataaacatctaatccatttatcattaagaaatgggaatctaataacacaccattcttctttaatatttctattatttggtgaaagtaatgttttaatatcagaaaaattaattgcctgtgatgaaagtaatgcacctgtataagattcttgtaattgttgaaattcaaatttacaaagtaaaattgatgaataaaaattatttaattcatcaattgaattaaattggaaattaacaattgaattatttgtaattgtaacagttaaagttatattattttgattatattgtaaatcacaatcacatatgttaatattgatattattaccatcattaaatttaacagttatatcattaccagttaattctaaattaatcaatgaccaattatttgataaattatcagaataatatgcttcacctttataatattctcttacctgttgatatgaaattaatgttacaattggtaataaaacttcaggtaaatctttaacagatgaaataattggagcatttgattgtaattgagttgaatgagagaatgaacttttacgaattgaaggcttagtaaatgatgatgttgaagatgatgaaactttatcttgaactggttgaggtgatggaacaattgaaggtgatgatgatgatggttcagtagaaccactagaaggactagacttccccttagtttgagacttatccttcttcttaaagaacttaaacaatgccatttaccaaaggaaaagaacaacagaaaggataataataataataataatagaaacaggctggcatgaaaagtacgttttctttatatagaggcttttatttactttactttgctttgctttactttctattggcaatatgattcattctattatggtatttaacaatgatggtgttcctagactggtacgtagttacactggtccatcattgagagaggaacaatcacttttgaaagaattacataaaagagtacgtgcacatgatgcagagagtgtttcatcatcatgtttcttaacagttccaagtgaattattaaagagtaatggacctgatttaagagttatttatcgtcattatgcaacattatattttgttgttgttgcagatataaatgaaagtgaattaggtatacttgatttaattcaagttttcgttcaaattttaaataaatgttttaaagatgtctgtgaattagatttagtatttcattggcaagtattacagacggcattggaagaaatggtacaggcagggatggtaattgattgtaatatggataatataatgtcagcaattgattcaatgaatggtgtaaaggagagagaatattcaagatcaactttcttctcaagatggcctgtatcgtagtcatgggggaagacatattaggatatgtatatggtagaagatgggaatgtggaatacggtaatagatagagatataatcaataccaacatatgtacattattcaattataactatattatataacatctatatacaagataaatacctcttctaattacttctttaaagcttcagcttgttcctttaacttatccaattctttcatttgtttattatcagcttgttctctctcaagagcaactttatcaataattaatttaccacctgtaccttcccaaggattatataaatcaccagttttccaaattggttcattactcttggatgatttcttaacaatttccattaataattcttgttctctttgacgtaattctctattcttttcaacttgagctcttatttcaggactcattcttgataaaagttcctcctctgttggaactgtaaatttgaataataaaactcctaatccaataattccacctccccaaataacggaatgtttaatcatcatcatagtaggtgatgacattgtatatgatatgttattgtttgtcaacctctaaaagaagataatatacttataaccatacacttaataaagtcaaatttttattacataataaaccatgttgttttttctatttatctttatctgcaacacctttttatacacggtatcatacaggtaatgtcgtttggtagtaaacgattagatgttaataagatcctaaataagactaaagttagtaattatagtggatttttatcaaattcaagtattaattatcaaacaagtatattagatgaagatgaatttaataatgatggtatagatgatgatgatgaaattgttgaagttaaaagagttaaagttaaaaagaggaagaaagataataaagagaatgatgataataaaaaggatataattgtaagtccaataaagaaatcacctgttaagaaagatccaattaagagagttactaagaaaaaagaggaaccaaaagcatttgaagaacctaaagaagttaaaaaggttccaaagaagaaagtgaaatcagcaaaggtaattaaagaatcaaaaccaaaaccaacttaaatcagctaaatcagctaaaatcagttaaaccttcaaaatcagttaaagaatctatatcattatttgaagttttagatgatgatgccaattcacaagatgatgaaatatttgaacttggatctccaaagaaaaaaccaaataaaccaaaacaagtaaagaagaaggttaacaaacctgaaatacccaaattaaatgaaactccaactccttcacgtaaaataaccaaaagaacaagacaaacaaagcaaaagaagaatgaggaattacccatagaagatgatactattgaacaagatgaacctgtttcaaaacgttataaaaccatctaaatcattaaagaaatcaaaacctgaagatatacaagacttctttgtaatggatgatatacctaatgatatacctgataatgtacctaatgatataataacagaagacatacccaattcacaatctcaacctgatattaaaccaccaaaacattctaaaccatcaaaatcattacgtgaattaactaaacaaataacaacagaacctttaaaagatactacagaaactactaaaatcccattacgtgatgaaataacaacgggaagagcatcaatgttattaaggggtaaaagattaagttcaataggtaatggttttacagctataccacatgaagaaattccaattaataaattatatgaacatgttgatcaatcattacctgaatcatataaattaagacaattaattatttggataagtaaacgattacttaaagataatgaacaaatgaatgaaattatgaataaggaaaaatttaatggtaaaaaggaagaatataaagagataattaatgagatgattaattcattatctaaaggatctattgatgttgattggtggggggaagaagttggtgaatataagagagagaatattcaaaatattagaaatgcaagtaaattagaatattataagaatcaaattgaaagattaaagaaagaggaggaagaattgaaaaaattagaaattgaaaaagttgttaaaaatgataataatagtaatagtaataatgataataatgataataatgataataaacctgttattaaacctataatacctgattgggaagatgatattgaacgtgttgaaaaaatatataacagagttggtaaattagagagattattacatagatttggtaaaagtaaagaagttattaatagagttatggaatataaagaaggtattattgcacaagttattagggatagttgtgattatgatgttattgaaatattaaaatcattggtatagtatagtatagtataatcatttattataagtattttttagctatatttttaacccttgtagtgaaaaattttgaattaattggtgaattataatcataaaatggtgaaagtaatttctttaaatataattcatttaattcaataaagaattgtctaatactttcatctaaatttttactatttgtaagtattatatatttaatattactttgagttaaaaatataaatgttgaataaccataaaatgaatcaatattattaaaataatgttgttgtgaattaaattgaatattctctaaaatatctaatgatgaatttgcaataaattgttttaaattatttatattatcagggaatttaaatattccattggaattttgtttatatgatcctatatccaattcatatactggagcattgttactacctattatagtcaaataatacgacattgattggatacagtaaaagaagagaagataaactgtataatatagtttaaagcatacagtttttgcgaaaccttaataaaattcatgtagtctcttaatattagaatctgcttatattcattttaccttctgcattgaagtaatgaacaatactaacactaatgaagtaatagatcctagtactagtagcacaactaatagtataaagggtaaagaaacactttattcgatggaaacaacggatttacttaatcatcgtataaaattaatggaaaacttaagattagataaggaacaagagaaagaaaaggacaataacaatgaaaaggaagttaagaaagatattgaagatagaggaattaataaggataagaaaaggattaatggtggtggaattatagatgatgaacctatcaatgaagggtatcaattaatgattgaaagatatcctacattaagtgttaaagaatataataagattttcaaaagagcacaaattgttaaatcatatctgaatacatattatgaatacattgaaaaatatgaagagatacgacatccaaatgaaagtaataaaactactagtatatatgaaggagttgatggagtttggaatccattacaaattatgcgtaatcgaaggttaagattacatagaggggagaaattaaagaaagaaggtgattggaggaaagttcgaattgcaagtagagttttcagtaaacatgagaaatctagattaatttggcaagttggattacatgaaataatcggagatttagaatggagagaaggtaaatggaatgatttaagaggtaaagatggtaaaagaattttcaaaaaggataaaggtaaagataaggataagaaagaattaaggaaagttttgaaattatcaattggtgaacaacctataaagaaaatacatgataaattgtttaaagatgatgatgaagaggaagaagaggagggtaaggagggtaatgagaatcatcataatgaagatgatgaaattggtggtaataatgatgttaataatggtggtaatagttataataatatagaagatgattattttgagaagagaggtagaaatattcataatagtatagaagataatcataatgaagaagatagtagagaagttgaagagccaataattccagttgttgagattgataatgttgataaggatattaatattgaagaagttgttgatatattaaacattgattccagtatttcatcaagtattgcccttaatgaactgtcaatgtcattgaatgcagaaaagatgttaatgcaagtaaataaatggtcaacacttttccaagataaaatgttaagattagatgaattagagaaaattagtttaactaaatgttctacattacaaaatattgttaatagttgtgataatatattagaaacacagaaacgagatgttggattacaatctgctgcagttgaagaattattaggatattgtagtagaagtagtggtgcagttaatacaggtattacattacatcttagacaattacatgaaagagcagattcattagcaagtggaggtaataataatggaggtttattatctaaaattgttgaaattacaattgttggagcactctggatggtatgggttgttgttgaaatttggttaggttgtaaacatttagttgtttcaattgctaaaattattaaatggcttatattctaatagatattttatattttatatataactttatatagacactaattagtaccagtactaccgaatccaccagcacctctttcagtattacatacatcttcccattgtttatcatctaatacaacaacatcaggtgtgacaattctctctaaagattaattgagcaattctatcacctttattaactgtaaaatcaacatttgaatgattaaataataaaactttaacttcacctctataatcagcatcaacaacacctgcaccggtagaaatacctgccttaacggctaaacctgatcttggagcaacacgagcataagtgttttcaggacatacaactgctaaacctgttgagaccagaacgcgtccattagctggaactgtagtgttttcagatgcataaacatcgtaacctgcagagaggggggaacctctagtaggagcagtagcatcggcagttaagagacgaacagggaatgacattgtagatatgtatacttgtttaaaggaagaaagtagtggttattaaacgtagaagttgttacacgttaaaattttcattgactttatatattaggaaaggtctttcttttaaataagagtctttatttactttatcaacaatgtcaacaccattatatggaggtgcaatcactgcaaaactacctgcacatctcttagatgcatccaatgcacgtccagttccagatagtcaagaagtttgggtatctgatcataatggagttatcattgatttacttgaatgtgtaaatggtgatgataatccaatgaatacacatattgaagaaatggaacgtttaggtggtagtaaattaattacagatagtgaaaagactataactgtaaatgaaccattggttcaattagctgttattagaacattccctaatgttgaacgtcaatttcatttaccatcagctgttggtttacttagattaaaatcacctgcagatgtcgatgtactcatcactctaacaggtgtatgggataaccctgcaatggaattagagtctatactacaatccttccatgttaaggatcaatctctctttgtataatacagtatctacctttataacagtttacgtaatttattgatgattaatattaatataacaacatcaattcttcctatgaacaacatcttctttctgtgaagcaaatggcatcggtcaatactacactgttccctgggtactccccctcttgggatgatcgtatggatatgaattctggttttatacctgttactgatgatgattcattattcttttggtcctttcatgctaaaaataattcatcatcaaataatttatcatcaaataattcatctcgtccattagttatatggcttaatggtggacctggatgttcatcaatggatggtgcattaatggaaattggtccattaagagtcgttgatgatacaacaattaattggaatataggttggtttgaaagatcagatttattatttattgatcaaccaataggtacaggattttcatttatgaaatcaaattcaaattcaaattcaaattcaaattcaaattcaaattcaaattcaaattcaaattcaaattcaaataattttgatacttcacttgaacaatcttcattacatttattaacatttttagaaaattattttaataaattcccagatcaatataataattataattctttaataattgcaggtgaatcatatgctggtcaatatatacctcatttaactaatttattaattgattcaccccgttttaaacataaattaaaggctattatgttaggtaatgcatggttagatcctcctttacaatcattatcatatataccttttgcaattgataatggaattatcgatattaaatcacctgaacaggaaaagaaagttacaaatttaatgcaattacaacaaagttgtcaaaataatcaaaatactgaaaattcagctaatcaaatttgtgataatatcttacttaaattattatcttcttatagagatccataataaatgtattaatgtttatgatattaataaaattgataattatccagcttgtggtaataattggccagaaattttaccttcaacaactaatttccttaatttaccaaatgttaaatctgctttaaatattccaattgaattagggtaattggaaagaatgtaataatgatgttcattcacattttacaactgataatgatataactggtgcagaattactaaatcatattcttaataatggtattaaagttaatttatttagtggtgttaatgatatgatttgtaattatttaggttctgaattagttattaaaaaacatacaattgattaccttaattcaaataatttatcaattattcatcaaaatgaaatgaaatgaaatgaaatgaaaataacattaatggtataacgaaaagagatatcgaaaaatttcaaatggataatcaatggtatcataatgataaattatcaggttctatatggaatcgtgggaatttatcctatattcaaatttataatgcaagtcatatggttccttatgatttatctgaaactagtataggattactggatttaactttaaatgatgatattaaaactcatacttatactagaagtacaatacctaatgaaaataatgacaaagaagataaggattcacatagtaggaaatcaattgcaattatattactttcacttatatttatattgataatttggtgtttttataaattttggaaaaataaaagaaattcacaatattctgcattagctattaaaagaaaaaatacttattcaagatatgcatatgaatggatgtcaggtaataaggggaagaaaaaagttcattggattgatcttgaaggtggtgatgatgctgttgatggtgatggtgatgttgatgaattcaatattgatgatgatgatggtggtgatgaattcgatattgataataacagtgatttcattgatactcaattaaatgaacttgatacagatgatgttcatgagaataataatgaattagatgatttgaatccaatccaacatactgataattgatgtatccatccttctacctctagttatttatttatacctgttatatgtactctctgtaatgtttacaatattaaaaggacttttatacttttactgcgatcattaagttaaaaaaatatagccgatattagaagtattatttagattattacacagaatgaagagagaaggcatgttataaagatgattttggataataattcttcttttattatcatttatttattttattattatcttttgtttatttgtttttttttattattatatttataattattttaattaaaaccaggattattcaattattaatgttaaagaaaatttaatcaggtacttgaaatttgtatttattcctattatgaatcaaattagttgtaacttcatttgtattatttgaaaatatacagttattaccaccacaatataaccatatataaaaaataaattttgattcaattagttggaattatttaagaaatttttaaatagtttagaaatgttttccaaattcaatctcaaatttcatttgctttttcagataatgtaaatgttgttgttaattttggtcttttaggaaattgattgttttagaagatttagtcttaaaaattgatttaataataaatgaagttatcactactcttgtgtgagagtaaaatcaaactgataataaggtcaaaaaaattagatttaattgttcaataattgtactgttattgtaattactgcttgttatagattgatactattataagataattaatttaaagttcatattggattttttttgtaaatggtttttaatagtgtctaacaggctttcatcattggaattggaataggtattggtattgaaattttcaatggaatttgtgtaatcatttgggctaacagtacatttattgttctcatcattggaattatcatcaatggaattatttaaattaaatctaatctccccgacattattatcaatttacaggaatgtaattgttcttaatattgttcttattgttatttaaattgttcattttattgtccttattgttattaatgttcaaattattggagtttctaattggttcaatggaatttaatttattattatgttcaagtttttcaacaaattcttctaaaagtttcaaagctgtatcaagaccatttttaactgcatcatttacattttcatttaaagcaaaatcatttgaaatcttatttgaattatcttctaatttatttgaggattgattaaataaacccatcatattgtttcttgacttatttcccaaaatctcatttgaagtttcaatttcataatcatcatcattagtaaaaaatacattttcttccttggtaaaatttctaaaatcattaattctattggttttcttggatttactattaaacttatttctaatataatcaatatcagtattaaaataaacatatctttgtttaattaaagaaaataccttcaaaacatttttacctttaatatcaaaatcataaacagtagatacatcatcgttgtttttattaatattaatcttattattatcatcatcattatcagttgaattcttaaaaacagtttcagttaaatcatagtcagcatcatcattatcagttgagttttgtaaagcagtaccagttgattcatgaccagtatcattatcattattagggatgatgatcaattatagcatcagatttaaaattaacttgatctgcaattcttcttaaggcatcatcaattgcttcaggtgtcattgatgaagtttgatattgagtcattgatctttgacttgagtaaagtttatgttcttttgaagtaattgaattattaaactgttcaattagtaaatcaatttcatcagcttctttaatacatttttcatcacttgattgaggacgttttaataatctaacactcattttaaaagtttcttcagttttctctgctgcataaatattcttgaggtaaataattgatcttaaatccatttcaacttttagtgtttttttgatattaaaacattttctaaatttatgatgtttactaaaatattcaatttgaggtctaataacttgttttaaaaatctgctttttaattttattaaaaaatcatttgagcaaggaagtgtaaatggtaatctgcatttcttaccatttctttcataaacaaaattatctaattttgttttaaaatcaaagatattcagggttaatttatagaattgaatttgtgaattatctaaagcatcataacattcttcaatccaatttgaatcattaaaaaattttgatttgatttcaactaaatttttgtttcttctaactattgcatttaaaacttgaattttatcactggtatttaagtttttgttacgttcattaacacctaaaaatctcaatgcagttgatggtaaaaattcaacaatttcatctgattcacatctaactttctgtgaagctttccattgttcaaaatcttcaagacatttaattgggaaattttgttttttaattttttcaatccatttatctaatctagaatcttcattcatatcagatgctgaaatttcttcttcattaccatattttttgtataatgattttcttaaacttttctcctttttcatagtgaaaagtaaggatttatttctaataattgaagctgattcaagtaatggagatggacaaataccattatgaccagttaaaatagtacgaacaaaagttgaataatcagcattaccactcatttgatgtaaataaaaatcatgagaataatacatttcagcagtttcataatcagttaatgaatatttaattttataattaatgaaatcatcaataattgataaattaaatgaagcttttgaagttgatttaacataaccttttctgaataaatctaaatctaaataaggcataattggagaatcgtccttatcataagtaagtataccccttttatactttaattttttttccttggaaagaccataaaattcatcaacaaaagaataataggtattcattgagaatctccataaaaattttggatcatctaaatacaatttaacttctctatcagttgcttcaaacatataaggttgaacattaaaaaatttagatttaataaagttcatcttatgtttattctttaaacagaagtaagttaatgaccaagtgtaagacatatacttttgtcttttgataatagttcttagcagttgcttccaattcgtctaaatcaaagccaaaatatttagcattaaaagcttctaaaatttgagcagtaccaaaaattgttaaagtagttggacaaacatttgaagtaaatctatcttcgatagatgtttttaaatcaggattgaaacacatttttttaaactaattgatttttctaatttaaattggaacagtttttaaaaatatttgaacttgaaatttactctctaacttttaaaactatagggtttgataacaggctttttgctggttgttaaagaaaaaataacaaagaaaaagtaaaaaaacaggagaaaaggataataataatgagtagaaacaacaagagaaaaaggaaactcactataaaaaatcccccaaaaacccaaagaaaaaggcaatgaataagtataataatgataataataaatgaaacgataataaacatgaaataggggaaagtataacaatattgaaataaatgatccttaaaatgtatccttgttatcaaatttgtttatttttcattaaaaaaattggtggctcaactttttccccgcgatattatcttttttttttcaatttttatgagaaacggtttattatggtgaaattttgtgtatatagtgagctgagcctgaagatactattgtataatttccagtgaagttataattgaatagatgatctaatgcatgatttatgatggtaagatcataagagcatttgtaaattacaaatactcatggaaataaattaagatttcgttatatttaaacaatttccaaatttatcaaatagtgcatattttatttcttattcataattttttgttctataataaatttataataatccattatttttcatgtaatgtatcattaattgatggtttaattaacgacattggcgtaataaagagaaaagaaataagatgaacaaaaaccagtaaaagttaaaatttgaattgttgtttttaatttcgccaccctcaatgagaacaagtattacgtaatattttagatgtattatttcacccccttattatacaagttaaatttgcatgtttaattggtgcagacactctttgggagattcaactctagtcattaaaaaaaactaatcttgttaaacattgatgtaaaagtaaaaaaactaaatcattagatgtaatattgtcataaaaccacagttatataacctcttcaacactcatataagcttaaattattacaaaacttttttctcttcttatttactgtatcaatacatcttaaaaactgataaattacacttttaaatcaaaaaaggcattagtatttattaatatttttcaattttataactctacaatcattttttattctttgacatgtttacaaaaattttaagttacaaaacacactcaaaactactaccctaaaaactttcaagtataaaaaatataaaaaaaaatcttttaaatctactaccgccctttcaattaccaacaaatcacacagatattttaactggcggtcacgtgaccacaatacactcttaacatagttaccccttcatttaaaaactacaacaagtccgagatagtttagtggctagaatttccgcttgtcacgcgggagaccggggttcaattccccgtctcggagatcaatttttttttacccccttttcttttttatcttcccattacattcttttaagcttaaattcgttatcatttttattataattatcgtaaataaatttaaatcatataaaaaatcttatacacactattattgttcttcatgctcttcattaatcatatcattaacgaaaacttgattcatttttgaacctggtataataccaggtgtttgaggtaatccaacttgaccttgcgctattgataaaacattattattaccagtattattattattatttattaatcctttaatatctaatttttcacttaatgttttacgtcttctttgtaaaattgattcatcaacttcatcattattaatattaatttttggtatacttactatactactactactatttttattactaattggagtatttgatctattattatttaatgtattaattgaagtatttgatgctaatctattaccatttctaataattgaagcttgaactttccttggtgcatatgaaaaataatctccattaattgaatttgctgaagttggtgttaaatttggtgatttaatatttgaatgtgatatacgtgatctaactggtgaattagctcttgaactagttcttgaatttggtctagagttaggtcttgaattaggtcttgaatttggtcttggtgaaacaattgatgatgatgaattttgtctaattactggcattgatttaacacttttaaatgcaatatttgatgtaatatttggtaatggacttaaattaaaataatcatcacttggtgaataatttgataaaatacttggagattgtctttgaaattgagtattttgaaattgagaatttttaaattcatcactaattgatcttgaatgtgaatgtgataatggatttgaattggaatttgaaattgatgttgaatcactattatcacgataatgattacgaccacgagattcttcagttgataatttttcaaaactattattcaaatgattaacattaataaaactttgattaccatcatcagattcagtttcattattcatctgttgataatcaaaattgccttgttgttgttgtatctcatcttcctcctcttcatcatcatcataagaattatttctttgaattatatcactaaattcagttaaatcagataaataatcaacccatttaattgttgtatcaatatcatcacatttaaaagtatattttgatttagttgaatcttttgaatcatttttgaaaattctaattataaattttttaggatcattatcaacagttgaaatattaatttcatttaatggatatgattgaattggatttaaatctttaaatctatcacttgatttaaattcatgtaaaaaattaattgttaaaacataataaaattttgaataatttttcaaatattttgatttcctctctaaataacctgaaaaaatacatgaactaattatattactcttataaggataatttatatcagaagttttcctaatatttttaacttttttaaatgtatcatttgcattaacattaataaaatttttatttttatcatttttaatgaaaaaatcccaatcaattgttggttcatttttaataaatccatctctaaatggattaattaaattatctctaactgtatttaattcagaatcaattaaatcagtataagttgaaatacatgattgaatttcactatataaaattttctctaattgaacagattttaattgtaaatcataataaatttcctttaaatgagcttcaatatataattgatcttttaattgtaaatcaatttttaattttaaaatataaggatctaattttggattaaattcattatcctttaaattaattgttgtacctaaacttgtctttgaatgaccagttttcaataattcaattgatgaaatataatcagataaaattgcaccagttttagcaatttcaatttttaaatttttagttttaaaatcaggagaatttttaattgaattcatttgtttaattgtttcatttaattgatcttttaaattatctaatcttggaattaatctatttgataaatgttgataagttgttaattctttttcctttaaattcatatgattattgaaaaatgttgaagatattgataaaattgaattatcattagctggtaaaaaagttgtttgtaataatttattaacagtattttgttgatcaaaattaaattcttgtaaattatttaaattatcatgtaaactttcaaaactacgagaattttgttgttgttgttgttgttgttgaagattattatcagattgatctttaccatcattctctaaatttgttgaagataatgattttttcaaatttttattactatttgcttttatctttaatttaccagaattttgtcttcttaaaatttctaaattttcaatcattgccttattaccttgataagtttgacccttaaatacacacatttccttaaaatagaaaacaatttgctttataatcattttccaaatactaaatctataaattaattgatcaacgggtcttggatcatcaatatttttaaatggtaaataataaggagatttcggattatcaggtggtaaaactgtttgatttgtaaatctcatatttttcttataaatatcatcaagattgtacatcccttgattactatttccattatttccattaacattactaattatactataagcatcattaaaagtagaatttgaaatatttgaaatagatggatgtaaactattactctgagatgagtacattgacctattatcagattgattactcattgtctagcaaaggaaaagaagtaaaacacttaaaaagaacacaggagagcctccggatgtattggaatttaccatgtattaaacaaaatccttagggacgtttctctccctttgaaaaattatttttagtattatgttaattacgtaatagatagtatagagggacttgatttgattttgatttgattgatcagttgttaatcagttgatcaaattatataatataaaaagaacaataaacattatttaattaatttaattaatttaattatcatcattgttaaataaattaccaacatcagctggtaattcttcaattttagtattataaaacatttcaatttctctcattctattaatatctctttcagataataaattaattgcgacaccttttctaccaaatctaccagatctaccaattctatgaatataattttcattattatcaggtaaatcataattaataacaagtgaaacttgttgaacatcaatacctcttgctaataaatcagtacaaattaaaattcttgatgaaccagttctaaattctgccataattctatctctatcttgttgagacatatcagaatgaattgatgaaactgtaaaatcttgtttagttaattcttctgttaacatttcaactctctttcttgtattacagaaaataactgcttgagtaacagaaattgaatcatataaatcagttaaaaccattactttatataaatcttcttcaacattaacataaaattgtttaataccttctaaagttaattcatcctttttaactaaaattctaattggatctctcataaatttagttgtaacatctaaaacatcttttggcatagttgcagataaaagaacagtttgagttgtttctggtaaatattggaaaactttataaatttgttctttaaaaccttgacttaacatttcatctgcttcatccataataaacattttaacattttttgtatcaaatatacctctatcaataacatcgaaaactctacctggtgtaccaacaacaatttgtgcaccatttcttaaagctttaacatcatcttcaattgatttaccaccaatacaagcatgaactgtaacatttaaatgtaaagctaatgaaacgacaactctttgaatttgtaaagctaattctcttgttggtgccataattaaagcttgagttgttttttcatcttcattaattctttgtaaagcagaaatagagaaagtagcagttttaccagtaccagattgagcttgagctaaaacatctctacctgaaacaattggtaaaattgctctttgttgaattgctgaaggattttcaaaaccgataccataaatacctctaagaagatcactctttaaattcatttgatcaaaagttgcagcaacttcatcataattggtttcaattgtaccatctggattagttaaacctgacattgttaataataggaatccttgataaatgaaaaggggtaagtcttcctctattctaaaattaaaatttttttatattgaaaaggcggtaatgttagtttaatttggaaaaaactttttcaaaaagggtgatatccgggtaagtttgttattggaagtagtaatggaagttatactagatacactacatataggtattactacagtataataataatagtaatagacaaatagtattttaaattaatataaaataatatgtaatatgtaatatataagagtaaagtaggtcaagtaacaaacttaacgagagtaagaccaaacattatttaataaaccatcattttgagctaatctattaatttgatcatcagcttcacccttttgtctaataaaacctgagattgcataagtagtatttgaatctggaattgctctaccttcttcattaacattagcaataactaattgaattgaagcatgatcctttgctttaataattctgttagttgcagaacattttcttggaatatataattcaactaattcacccttatcgttctccatttttagttagttacctaagaaagtaaattaaaatgaagtaattaaaaaaataattaaaataaaacgtataccagactaagtgaaaatgaagaaaagtatggtaattcctctatggtgaaaaatttacaattacaattacaatagtatactataagatattatgaagatagtattacataatcagcaatattacataatcaatagtagattcaatatttgatattctattattgtattgtattattaaatttttcattctgtgcgtctcttttggtttttattttattttatttttttgattagtatgtggtgtgagggtgttgtataataactaagaatgcattacataatcaaaccctcttcgattacaaaccctcttagtacacacgtgaccagccgagttatccccgtcggaatatactttataaatggctttaaccgttatttcttttatttttttctttttccaaagaaggggcttttcaattttcagttttctatttatatacttaaagttaaggctcattaacttatttgatctgataatgtatatacttatctttatctttatctctcttttcattttctgtgcaaatgaatttggatattactactgatatatcagatttagatatagataatattcaattgaaaaatacttcaaggcatgatgtcggtttattacctgatgattattataaacaaaaattatcttatcaaatttataaatttagaagttatctattacctttaattaattatgaattatcactattaaaatacattcaatctttccatactcctttccttacatggttcttcatattatctgctaatttcggttctcatactttttatgtcctaatgttaccattacccgtttggattggttcaattcatttaactagagatttagttattgtcctaggtttaggtatttatttcactggattcattaaagatttactttgtttaccaagacctaaatctcctcctttaaagagattaacaatgagtcattatacttctcaagaatatggttgtccttcttctcatagtgcaaatgcaatcgcagtttctttagttttatcattacatatttatcattcttcattatcttcatatggtaaaattattttatattttttacttatttgttattttttaacaatgttaattggtagattatattgtggtatgcatggtttagttgatgttataattggttctttaattggtgctgtaattttcattttaagatatttaactataaattatcatgatattcttatcttaaataataattcattttgggtacctattatatttattacaatttattattcattaatttatttccatcccacaccaattgatccttgtccttgttttgaagattcaattgcttttatagctgttttaatgggattaaatttaggtttttggtcaatttcttatcttaatggtccagttatatcatcatcatcttatgataaattacaatttacaaataattcaccattttcaaatttatctaaattaggttatatttataataatcattatgctaaaattgaattaacttcagatccttttaaaatatttgctagaattttaattggtgttatatcagtacttatttggaaatcattatcaaaaccattatttacattaattataaatttaataaggaaacatatctttaatgataattcaaataataaaagtaatgtatttgcatttatgaatcgtaatgatacaagaattttagttaaatatatcgtttatgcaggtatttcaattgtttcaatttacttaaaatatttatttgatttacttaatttataaaaaaaagaacacacacaaaaaattgtataattataattaaatgaacactctctttactattatttcattaaatgttccttaacattctctaatgtaatctccttttcatcaatttgttgaatattatttaaatgtaatttactactaaaatgttgtgataatttaagtgaatctttatatttcctattacataaatcacatttaaaccattcattaccaaatactttatcattaagtatattttcaatactacgtgaagtaaccactttactctccttatctactttacgtatcttagaatactcttcaacatcccatgttttacgtccatattgattcttttccatacccccctaaaaagaagtaacccattcgttaactaaacaaatttttcaatctcggactttttacatcatgaatccttcattttacaatgctgttttcaccgtatttatttgcttggagtcattataatcctaaatacatcattaattccttatctacatgtattgatcataatataccttcaataacattagcatttttagttaataataaatatgatgaaattaatgattggattgatgaaataaggcaatttaataataaaattaacataagattaagtattggtggtgcaaatggttggattaaggatcaggggcaaacatgcgatgaagtttttgaggaaattaaagatttgttacataggagtggtataagagaaattgatttagatattgaaggtgaagtattagaaagatgataagaagattgaagatttgattaaaattgttaaattattgttaaaggaaatggaattagtaatttcattaacattaccagtagaatttaatggtggattaaatgaatttgcaattaatactatttgtaaatttcaacagaataggattaatataagatatgttaatttaatgttaatggattttttcactccatttaatggtgattggtatattaaacatattgaaataattgaatacgtttatagaaatcaattgaatcgtttagggattgattataatcatatgggtatttgtccaatgattggagagaatgatgatcatacaaaatttacattaaatgattggaatcatttattaaattttgcaataagtaaaaaatatagggttaattacattttgggcaattaatagagatcaaaagaataaaggtaatggattaaaattttggaaatcatcaattaatacacattctaattgtcaagataaagatttattatatacagaaatggttttaaataaattataatgaaacccttaatttttagataatttatttaatctagtaataacatcttcatcagtttcaccataatatctaattggttgtttcaattgtcttaatttatattgtgccttttcaataactggtgcatcatttgatggttcttcatttgataatgtatgtaatttgaaaattggtgtgtagtggattctttatttctcaatttgtttatttgttgatatattttcaataattaatggttctaatttagatattttattaatatcaataactttatcaacagtttcaaaatattgaattatatcatcatcatcatttttattattattattatttaatttaattaacatatccttatttgaaatattttgttcaaatttaattgcttctttaatatttggtggataatttaaaattataaatctacccatttttggattaatttctttaattttcaatatttgatcattaataattgatgtgaaaatacctggtttaagtttatatgagaaattatatttaaaaccatcattattttcatcaattgattctaatgtttgattaagtaatatattatatttacctgaattattaatttgttcattaactaattgatttaaatctaaaatactaacatattcatcaccacctaatttatcattcaattgattaattttcttattattccctccttctttattagcaaatggaattaaataacattcttcattattctccaatgttaaatgtttcttttgaatttcactaatatattgattccattcatcttcactaaaagttttcttatatttctctaaatttttactatgatcttgttcttgaattctttgcataacagttatataaaccattgtaccgaaaacaccaactaataaaaaccatttaaattgaattttatcatcagttttaccctcattttgccatttggatgaatatcttataccacccaccctaggtatactcttaacactcttccatggtctaattccatgtccatagggtctaataatactacgaaacatctttatccagtaataaaccatccattgattaaaagcgaaaattcaacattttcttaatttcttccatttttccaaatatttcaccttaaagtacttattatacttcttccctaggacaatgtctattgtatcattagctaacgtttgtgcacatttacagaatgtatcgatggcaagagctccacttgcttcaataccatataccagacttcatttaaatatagcattaggattatataaagaagggtttcatatcatcattacagagaggttcacaaaatggacctgatattacaccagttgaagttacacctgataatatttcaactagaagattatggttaggtatgaaatatagacaaggtaaaccagttttatctaaatttcaattaatttcaaagccaaatagaagagtttatgcaaatgcagaagatttacaatcatttgcaagtggtaatcgttttagatttgttaaacctgttatgccaggtgaaattgtatttgttagaccaagaggttccaaggaagttattaatttacatgaagctgttaagaaacatgtagatggtgaattattatgtagagtcttctaatagttatatgtaaatatgacctatattcttgtataaattgaaatttaatttttttagactgtggtgtctaatataaaacgtggataatattattatgattctttatttacacttctttctttaagcaaatgctaccacatacattcaacgaacctgttccattagccatcattggtggtactggtctctataaattagattcacttaaacctgttgcaaaattaacaatttcaactccatggggtcatccatcatcaccaattacaattagtaaaacttcaaatggtatgccaattgcatttttagcaagacatggaccaaatcatgattatttaccaagtgatgttccaaatcaagcaaatattgcagctttaaaatcaattggtgttaaaattataattgcattctcagctgttggttcattacaggaacatattcgtccacgtgattttgttttaccaaatcaaattattgatagaactaaaggtattagaaaatcaacatttttcgaaaaaggtttcgttgctcatgcaggttttggtaatccatttgatgataaaattaataaaattatttcaaaaaattgtcaagaagttttaattaatgatgatggtcataataataatgataaacatattttacattcaaaatttattgaaaatgatggtaaagatttaacattaatttgtatggaaggtccagcattttcaacaagtgcagaatcaaaattatatcgtatgtggggtggttcaattattaatatgtcatgtgtacctgaatcaaaattagctagagaagctgaaattagttatcaaatgatttgtatgtcaactgattatgatgcttggagagaagatactgaaccagttactgttgaaacagttgttggtaatttaacctgcaaattctaaaaatgctcatattttagctgaaaaattaattgaaattttagaacctttaattaaatcaggtgaaattggtaatgatttaactggttcaatgaaaatgtcaatttcaactggtccctctggtagagatccaaatgttttaaagaaaatgcattatttattcccaggttattggcctttagataatgatacaactagatcttaaatattctatatattattataatattctttatttaattgattaataaaaactacgattagagtttcttaattcattattaacaccatataaatatttaccacttggtgaaatcatttcacgacgtttttcattaaacatacctgaactccatgttgaattaccaacatcagtgttaatattattaatattattaatattattactattactattaccacctcttaaaactaaattatttaatcctcccattacatcttcaatatttttactatcaggtatagttattctagttggtttttcaattggtatttgtgaagctaattgcattttttgtgtaattgattcaccattatcatcatctaaattatcttcaatatcatgattttcatcatctaatcctaatactttcctttgtgatttagttaatggtaaatctaaacatctatcaattggctttaatcaatctataaatagaatttataataatactaattaatataatttgaataattgtttcactatatgaaaaaaattttaaaatattttcaaattcaataatttcacttaatttatcaaagataaaatcaaatttatcattaacttttaattgacttaccattttagaaaatttattaattgaattaccaataattggatgtgtataaacaaataattttataattgatttgcaaaatctaacaattaaaataattaatgaacaaatcattaatttcctaatttcatcatcctttttaacaattctaccaatcgcaactttgacacaatcatcattcaataataaattaacattagtaacattattgacatgtcccttactaatagactctttactattaccattattactaccaattttacttaaatctgtaataattttatcacttccatttctatttcatttccatttcgtatattaccaatatctttattacgtgaaaaaacactatgagaaaatgcatttatatcataattaccctctttccttattatttttattaaaatcattataatattcattttgatgttgtttaactctttcacttaataaagatttcttatgattattacttttatttggtgtttcaataagtgatttaatatttaaatatggtgaaattttattgatttcaggtaaattgatactaccatttatagttgtatcattatttatagttgaattatcttgtgttgtattgaaaaatgaatatgacatttgatggttggtaaatgaaacagtgatattaaactcttaataatataggagaaaattaatttttttttcaattcatgtagtgagaagggattgccatgttctcgctctttttgttatgagaaattatattggacgggcaggttggaattggtttagtattgctgtgtatttctttaggtgtgtttgtacatggtattagatattactatagttagatagagtaaggaataatgatgattttgatatacatcaaggctatattgttaggatgtttgataaagtttaaaaccaaaattaactaaataggctactttttaaacttttttttattaaattttaagttcagtacttttgcaaccctgaaaaagcgttcaaaacaattgaaatccttcattttgcgggtgtcacgtgcaaacactataacataattaacatcaaataataacccaacaattaagactggatggccaagttggttaaggcgtgcgactgttaatcgcaagatcgtgagttcaatcctcactctggtcgttatattttttatgataatttttaattttttttataagactttacaatacttttttttaaatcattaaagataatattgtaaacgtcatttagagtaagtttatgtatttttaaagagtgtataattttttttccttatttttaaaatataaaacataatataaaagttaaagaaatgaaataattagtaaagaattcataaatacaattattcaatgtcagaaaaaagaaaaatagaaatctataaaatgatgtagtgtaaaagggtattcgtaaatatgtgtttataggggtataataataaattgatttaataaccacaatattgtttaattaaatcattcaattctctttcttccttcattgcaactgatttcaaataatttgataatggagtatttgcattaagtgaatttaaagttttattcatattaatattagtagtagtattcttagttggtttaacaaattcttcattaagtgattctaatgaagaaactgatgaagatcttgaatggattgaagaatttgatgaataaattgaacttgaaactgatgaatttcttgaatgtaaagaagaagaagaatttgataaagggacagtgttattattatttggaataacaattgtttgagttgaaccagcaatcataccctttgaaagagaatttctaattcttgattgtttctttaaatcatttttaattggatctaaaaatcttttccaaagataaattaattgattattatcaattgaaacatcccaatctaataacattaataattgtctttccattaaattaacatcttcccttttaaataaaccatcagtatattttgcccaatgtttattttttggacttgaatcatttaaattttttgaagcaataattaaacaagcaaggaaaattctatgtcttgtacaaggtaaaccttttgcatcttttggtaatttttcctttaatctattcatataaacaattgttgacattaaagtacctgtataaacatttgtatatctaactaatttagttataaaagtcataagtgaaggtaaaggttttgatcttacaagtggggtattatttggagaatttggtggtgaaggtaaagtttcagtaattgtctttgaattttcacaaggtaaaatttgtaaagtaactgaaactaaatgatgaatcatgtcttgagtgacaggtgaattaaggaaaatttgcattgcttgtgagtcagacattgtgtgatgtgatgtgatgtgtgatgatatgtgaagttgattgtttaaagaaaagaatagtttaaatgataaattataatacaaactacatcaaagtaaaagaattgtgggaagttaagtagatttaaataaaagacatgaaaatataataatcatgagaatgaaacacggttggagatgaacatactacctaaaagggagttaatgataaatattggaggcttaaatgaataaaatgaatagaatgaacaactgtcaattgaagataatacaatagattcccctgatgaaacggttctcctactgttataaaagtctcgctataaaagatttatctccttcccttgtgacgtgtcgcgtttgttatgtttatataggaaaagcgcgtttgctttgtttacttattacgtgtcgcgtttgttttgtttcgtttttagtttattgcttttggggtattacgtaagtgtatatattacataatcatcgtaccttatctacttcttcttatcatcatcaccatcacttttactcaaatcttcaactggaatatactgtatatcttcaccaaggtctccaaggtgtaaactattctctaacccattaccacctgtataataactttcttcaactgattcaattgtttgattacttattaatttattaacattatttaatggtattgatgatgttgcattgaataatttatttatatacgctggagtaatttgctcctcagcaatactcatcgtatttgatttatctattataataatattattattatgataattatttttgtaatatccttcataattactgggagtatttattgatatcgttgtattactattagtattagtattgttatcattagtatttgtattggtatttgtattggtattgatatagtaattattacaattattagtataattattattataatcgttatcatcataatggaacattgttatatccgtaatatccgtcataatttccattattattattattacctatactatgataactcctatattcttcactatacccataatcatacctattttgttcaaaaaattctctctctatattcctacccctatctattcgatttgtatttcttacttggaattgtttcatttcctttatatgcatatggatttgaattactatcagtgtaaactatccaatcattggattcaatagtatcattatcctcgtctttccctatatgtttatgtttatcattatcaggcataatatagtgatactacccatgcagtagatatactatctacagagaattttaaccttataaggaataataattactaataaaatcagtttatccgtaaatttttaaagatcacagggccatagtaacattacgtaattttgtgcatttatttatttaatttattatggctcagcttttagaatatcgatttcattctttctttctgcaaacatcctctaaatgacttctgacaatactaagccatgctatgatggtgtgataatatatgattcaaggtacagtgataaccattaacgctaattttaaaataaaagataacacactttactaacattaataaaaaatagtaatgctatttattacatacagtggtcgtgataatcttggcagaaacattttcataaatcattttcattatatccatgaaaaatttttaagattttatccaaataatccatattttcatcctaaactcataaacttcttagttgctgtatcaattgagttaagaatttcatattatttttttagttataaaacagttagaaaaatattatatgaaacagcaaaagaattagattttctttctcatattccaaaggaagatttaaaaattttaattaaatattcaatgtggttttcatgtgatgttatttctgaggatgaacttgatgaaattatattgggtgaatcagatacagatactagttcaataacatctcaatgataaataatcattgattaatattagtttgttctttgtttagtttaaagtgtaaccataaaatatgttttattattggttactttgttgatttcttcaatgtaagaaaagtcgtttatgcttttatactcattgctttgtaactgtgtagcagttatttagttattaactgttttccagttgatttaatttcaaacaattctattggtaatatctgctgaaataacagttagattgaataatctaccttatcgatgtaaattccaaattgtaatagacaaaacgcgtatgaaatacgaattgtatgattttcacaaaattactatgagacctagtttaatcttaattttgaaaatttcctaattgggtagtgtcaatggaataatcagcataaaattaaaatactttacgaaacatactccataatgattcactctccctttgtactatattagttctctgtggtataccattataacttactgcatcattaaatttaatttcctttatattatcatcatctccacgtaatgatcttttaacagctgtaattaataatggtgcacatcttttataacatgaatttaattctttatttaataaaaggtacattttctgtgatgctaatggtgcttgtaaattataacctctaattgaatcatttaaatctctaatcattgattctaaataagaatttttatttttaacccattcattattacgtagtaatgaagtttcattatcatttaattcattttcaacataatttttcgttttagataaaattatatcatctttttcattcttattcatatctaaaattgtattaactgcacatttaatccaatctttatctaattcttgtctaaatcttttaattcttaattcacaaccaccttgtttttcgatccatggaggtaatgcatcttgtttctttaatatttcattaagatgatattcagttctatcaataaacatattctccattgatgaataacctccatcaattggtttacctctcttaatatttttaaattctccacgtctctttgcatccataattctttgatctgctaatgatctaatactattatcaactgatgaaaatgaatcattaagtaacattgttggtccaagtaatctttccttatacatttcaccccaattatcatcatcatcatcatcttttgtattttctttcttttcagatattttattaagttgataatctaatgcaccctctcttgcatcatgtattcgtactctagtatgtttaggtggtgttataattcgtttaccagttttcaaaggtttaatagaatcattcaacattcttaatgatgaatctttaagactctcctctccagtccatggtttattcattgcaatttctttatcgtgtttactggccgaactttggtattgttgttatacctaatgcttgttgatatttataattaaaatttgatggattattggtaatttcatctaatttacgatgtaactcaatcttgttatatggtaatgcatcttcaattacacctgcctttggatcaaaattattaggttgtgcattctctgcaagttcctgtaatttcattttcaataaacttggttcattctcattctgtgtcttagccttacctccattgtatctcttacttatcactcgtattagttgtctattgatcaccgtcattgcaggttcactaattttgctataaagaaagagtactgtgaagagaaagttcaaaatcatggtgatccacgcgacgcgacgtggacttcctcattgtaaaaaaatttgattaatttacccatttaggaactattgtttacttttcagctgtgtttcatgtttctatttgatctgataggtttttgtaggtagaccgtcaagatgaatgagccagtagaggataggaaagaagatggtaatgaaagtcagattcagactcagagtcagattcaaatggaaaataaaatcaatgatgaagaaattagtgaaaatcatgattcaaatggaataataaatactgatgattgtataaataccagtgaattacataaagatcgtcccttgaccaataaatatattctgaatcccgaatttaataaccttatgataaccaaacttgatgataagaaagaagaagaagaagaagaagttgaaaaaccaacggaggatgataaagatactagtgaaattgaacattcatcaggatttataccaagtgaattaaagggtatggaatggcctgaaggtgatatatcatatgttgataaggttgtgagtgggatggatatgagtgcagatccagcattggctgatttaggtacagttttcttagataaaaattcaccaaagaagaatgatacagtctggaataaatttaaggataatcaatttcaaccaattattcaaaataatgaaaaacttaaaaatatgccaagtagtcaatcaactgtacttgatacatttgctaataaaatgggaaataacaataaccctagtaataagagacttaatagattatctgatggtattataaaatcaccatttaaaatatttgatgatacatcaattgataagaaaccagtatctaaaagtaaatcaaaattaaacatacagaatgatgcaccaaattttatgaatgaatccaatgagttatttcaaagaattgtaactaattcatcatcaaatggtgcacttaataaaggattatctaatatacctatacttgatatgaaaactccaattcaatcatctaataccaatgaaaagtgatgatgatgatgatgatgatgaattttctgatcgtgaaaataaagatgtgacgaatacggatgatataacttcagatgctgaggaatttacatcaattaaatcaactacaaggaaaatggttaatatgggtaatcaactttacaaagatatacaaactggaattcttaataaaggtttgactatacctaataatgaaaattcacaatatgattttacatcggctgatgaaaatgatgagaatgatgagaataaacctattgatgataataaacttctggaaagttataatattaaaacgtatgagggtataaataattctaaacctgaatctattgatcaattaagaaggagattgaatatggaagcatctaaatataacaaggatttcaatgttggagtaccaagattaagatctaatttaaaattgagaactagtaagaataatataaagccaatacctgtaccaggtcataatggtttaaattttatatcaggtgaagaatataagaataaagtatttgataggaaattacgaaaatttgtatcaaaatcacaacttgtagaagattcatcatatacatttgataataatgatggtaaaggagcatatgattatggatttgatactgaagtatttggaggtgaagaagatgaagatgaaggtgatgagagtgatgatgaattgagtagagttaatgaaacgagaaatatatttaatgatttatcaagttcatcagagataaataatattataattaaaagtgatgatggtgataaaagaagtaatggagatgatgaggatgatgatgatgatggggatgcgttttcaataacggataaagtactgattgatgtaattactgaatcatatccaattgatgattgggatttagttaaagaattaagtataagtggagctaaattagagcaaatatcacatttaaataaaatgacaccaaatctttggtatttagatgcaagtgataatcttataagtcaaaacttttggaataccatcaagtgtccaatttctaaatttatcaaataataagtttgatagtttaagtgctaaattttcagaaggtgaatttaagtatttacaaaatttgaatttaagttcaaatgaatttaaagatttaagatgtgttagagagttgaaaaatttgaattgtttagatcttagctttaatataattaaggggattgaatatttggaaaattttaaaatgttacatacattaaatttatctaataataagattagtggtataattgattttagaaaatttaagttgtggtttttagaagatttgatattagataataatgaaattgaggagttgattaatataagtgagttacctaaaattggtaatttgagtgcaaataataatagaatacgaagaattgtttatgataatgatgatggagaagatacacctaaacatcctaatttaagaagactttgtttaaacaataataatttaagtaaacttgaattaggagattatcaaagtttaagagagatacaatttgattgtaatcctaagattgaagttattgaaggtaatttccaagatattgtcaaattaacatcaagatttaatcctgttaatattaatgagatggtaattgataaatgtttaactaatggtaatatatcgacaatacatttaattggaggacgtatgccaaataattttagtaaaataatgatgatgaatagtagaggatttgaatttagtaatattcaaacattggatatttctgcaatgggattattaagattaccaatcaaatttagtgagatgttcccacttttgagagatttaaatgttaattttaataaattgattgatttaaagggtattgaaggatgtgaatatttacaacaattgaaattattagataataatatagagaaaattagaggatatttctcattattgtaatgaaaaggtgaaaaggaggttaaaattattagatgttagagttaatccagttactaatggtatttatcccgtatgtattttacgatgatgatgaaaatggaatagaagatactaataatacgaataataaatttcaattacatgaaatggaggacatatccgcattctgtattgaatacgctcgtcatcatttacccagtgaactggaacaatggcaagccaaatgtcatcgtatgcaacaacttaatggatccacagcaatgatacgatggagagaacaggtggaagcagagttcccagagatggttatgttagatggtctgattatgtaatatcctcacagtaaatttttttcctttaattctttttcatagtattatactattatcatcatgatctttgatacatcttcctttgacaaaatgagtgcatatccttggtatacacgtgctactgacattgctcactagacttaccgttgttggtcttgttggtttcactatttatatgactgccggtgttggttatcaagtatacagaaatggtcaattagctgaagctagagctgcaaagcaaagagaagttatggaaaaacaaaatgaatttgaatctgataatgtttccaaataatcacatctatctctatctttccctatctattaataacatgtatatatcctatataaaaaactgaaaaacttgaaattgctacagaaaaatatactacacttattatttcttattcttctttgtacggtatttcaaattatgatattgtcccagtttctttaatttacttattctacgacgttgtaaatgacgtatctcttcatcctgtggattaatatcaataacattctcctttgtaaatacttcaccacagtttggacatttagttgtctctaatttatccaatattaatttattcataacacatccacatggtacaatatatgaaaattgtatattttgaatattatttttattatcatcatctgattgtaaatcaactattatatcagatattggacattttaatgtatcctctgttaacaatatatttaaattaacaacatcatttaatgatcgtattgtgcaagactgactatctttatcatcatcattgttttgcggctggtgtctctttctattaagtaaatattcaagaactttttccttattgtataatttaccatatgcatccccaactatagggtttttgcaatcgttccttacttaatgaacaatatctgtaaccattaatcattcttgtgaatttagtcaatgatgatgatgttgtggattgatcaattgttgatgaacctaattttctggctgttaagtttaaaatctctgttcttgaaggaattgtaccaccatcattctattatattgttagtattcattcatcagtttggaaagaattataattatacatacacccatgtttattcaaactttcacttaccaactttaagaagtttgactgtgttaaataggtaaaaataatttttttgttaagaaaaatttaattactccgtggcgcagtagaagatttaataataataataataataataataatatcaacatgaaacacaatttcttctttatcaatcgacaatatgaatacacaacacggtatggatacctttaatagcactgctgaagcacaagtgaggaaataatattcaatcactaaaatcattaaaacctgaaatggataatttgaaaaattcaattaatgaatatattgcaaatgttcaaaacacgatattgaaaaatagagcatcatatcaagttaaattatcacaacttaaatcaactgagatgcaattaaaggctgaaattgaatcgaaataaactattacgtgaacaattatatgaagaattatcaaatgaaatgagaaataaagatcaatcatctattaaagttgaagaaatgaaaatacaggaagaaaatttagagaaggaaaaattacaattaactaaaagatttagaaaatatagaaattgaaattgttaataaaacaagagaaattaatgaacaaaaggattcattgaaaaatcaaactaatttagtcaatgataaattatatcaatttgaacaactattaggtttaagaattgaaccatattctaaaactgaaaatgaaattgaaaatgaagatagtactaatcaaaatgatactgatgaaataggtgttgaaaagataaaattcatatttaaaaatgttgatccatcagattttgcaagagaagtttggtttgtatttgatcctgaatcagtttccatagtttcaacatatcctgaaattccaactgaaacatgtgatgaaataattaaaaattttgtacatactaaagaaattggtttattatggaaacaaatgagatcttctcttcagaagaaactactatcttaatagtttgttcgaattaatgataagtgtgtaaattagtttaaattatgtagattaatattaatataatcaatcagtaaattcattaacaatagtgaataatgcgacatgttttctcttgaaacttttatgtttacttatttcttccagcacaacaatatgaatgtagatgatattagtgtgaaaagagaactagaaactgacaataatgataatgatattaataatgaagtaaaaaaggttaaaattgaaacagaatcagaaacaataatagaatcagcttacacttgaaaatccaacaattacacaaactgaagaattcacaaattctccatcaccattaccacatgcattaacatcaaaatcaagatcagagatacgtgcacaaatagatgaattacaagaaaatgatccaataaaggaaataactaaagaaaatgataaaattgatcaatcatcaagtacaaaagttacaaaagttaaagaaattaatgaaaattcacataattcaaattcaaaattgattaaacaatcgaataggaaatttgaggatataattgatggatctgatttacgtaggtttttgaataaatcattgtcaggttatttagttaaaggacttgatgaaattgttaaattatgggaatctggtgaatttgaaatagatacaaatgaaactaacatagatgatgatgataaccaattaaggaaaaaagtagtgttaaagttttcagatatactgaaacaactagtagatgagtaaagtcattattagattatgtacacatatatataaataaagcaacaaagaacattttataaatacaggaaatagattaaaatttctcttcgtaattattatatctatcatctcttaataaacttaaagtataacttgataataatcttactaaaccaattttccaacctctgaaaatagcctttaatccaatattttcttcactttcacaaacatcaacttctaatgattgtccctcataagttaaaggttttgaaccaaccagaatataatataatgttgataaataaccataataaccaccaaattcaatacacatatcatctttattaacacgcataatttcaggtaattcatccctattggttaataaataattaacttgagctcttgaaaataatgtttcaaatggtaatcttataaacataccaataattctcattataactgttgccatattataaaaatatggattattatatttattgattctcattgaatttaataaataatcaggataatgaattgtaaatgatttaataaaatttgtaataattgatggaataaacaaagtttttggtacatgaaatatatgtaatcttggtatattccaaataatttccctaaatgaacgacaacctcttgaacttgttgtaattataaatttcattctaattaatctaatttgtgacataattaaatttgcaaatacattactgaaaatacttaaaattaaactccaatttgcatttggtgaatgaattaattcaacaaataatggatcaggtataccaattatacctgaaataaatcccgttatccatgattctatagtatattgtaatgtattcattaaaaatgttgtattaacagcttttaaaatacctcttggaccttcctttgttaataatgcattaatcatatcaaatgcatttaatgattctggttcaatcagtatattaattaactttgaatcattattattatcccttgaagattttttccttaatacattacttgatttcctacgttcaattcgactatttcttaaattttcaatttcattgttattattattattaatatcattatattcattactatcattactttgttcattatcagttaatacatcttccccagttgataaattattatcaaaatatgcattacgaccaccttcaatttcactatctgaatcacttgtattatcataatcaattgtttcatttttattagattttatagttaatcctttcttcttatttttaaatgatcccaacttgtaataaaacacaaattacatcaaatggttgacttaaaatacatctgaaaccaaccttgaataaatcttgttgttaaagtaattaaaattgtttttaaattatttaaatcaaataattcattccattctaagtcaccaactgatttaccataacttgataaatcttttgaagttaatggagatttagcagatgctgcaattcttgaagccaaaaccatgtaatccaattcctgtaccacttgtactacctgatccaattgatctattaccattcaattgagattgaacaaatggtaatgattgtgaaattgtttgtgatgttgatgtatcaattataccaatttgtggttgataagcaataggataatgtaaatcaaattcagatcttgatacatatggacgcagtgatccatcaagataatcctgtgtattcattatctgaccgttggttaaatgaaaaggaaaggcaaattactaatacatgcatgtgcatggtcagatttcacataataggcagagggcttgtcaaaaaaaaatatcagatttttgtctttttactacatgatatactataatttgatttcttttgaaagttatataaataagatttgatatataagttttatatataggatagtaataatatagtaataatataatatatttaaattaaatgagagtggaaagataattgattaattaattatcatggattctccaactctttaataagtttaagtatttccaatcttcacttggaccatacataccaaaggaaattggtgataaaaagataaagaaaccaataactaatgcatataatgataaataccaaataaatgtaaatttagatgaattaactctaatatcaataaaatcaacaacataacacataactaacattgcaaaatataatgcaggcatataatgatgaacatatttaacacgacccataacaacgaatggtaagaaatgtaagaaccaacctaagaatggataaataccaccataaattaatttatataagtttgattgattcatttgataatacatcatcaattgaatctttaccctttaattggaaatcatcaaattgtctttgccatctaattaaataactgaaaacaattccaaagaaaatgaaaattgataaagttgaagtccaagttgttgcaggtgaaccaattaagaaatatttataattttcatcaccccaaccacaaagtctaataccaacatttaatgatggccattgccaccaatttgatgctaaatcatcttgtttttcaacatctggaactaatgcattattagttgccatcattgcaatatttaattgaataaaatctttaaagaatgaagtttttaggtaatttaaaatcttctggaggatttggtaaatttggatttatatgatcttcaatattccaccaagttctcttatctcttttaaaaggatttggccaacaaacaacttcaccttgtctaaacccccattgaggtaattgattatcagtaacacctaaataacaacctaaaatttcatttttaaatctaactgatgatgttaaaggatgtaattttaatgaatcttccttaccataatgatcaacaatttcaacaatccaattatctttatcatcaccaacaactgcatcaccataacctgaaacttcccaaacaccttttgtaacaggagctaggaacttcatgagtatgtaaatttctaccagtcattttatgaacaattctaactttcataccatcaacaacataatgagattctctaaattcatttcttggatcatctctaactaattcgaaaatccaatcattatttgcatctttatgagaataagttgtaacttgttgttgatttgaaccttcaggataagtttgtaacatgagaatgtaataaaccaccacttaaagattgagattttaaagtaattgttgaatcaattgtcataacatctcttggacctgaagttaaagttgaattatgtaaattagcttgaaataatgatgacattgttgcatcaccaggtacctgaacctgataataaatcaaaatgaattttaaagcaaattgcgaaaactgttaaaggaataaagcaaagagtgaaaattctagcaatccaatgacaaatataaactttaattgaaattgttttattaagttgaccaaataaataccataaatcaacaattgtataaataccaactaatgaagtaacgaataaaccaaccattttaactgaatcaacacaaccaattgatataccagttaataataaccatttaaaccattttctagagaatgcattttttggatctctattaatattatggaaagtatagaaacagaggacagttgtacaagtaaagaataaaagcattgaatctaaaaggataaatcttgctaaagttgtataagttgtttcaagacaaaccattaaagtaaataaccaagtaactttcctattataaccaatttgtttcattgtaaaataagcaattggaaccattaaagcaccaaaagttgcattaaataatctcattttaacgaaatcgatatattcaggatattcttgacctgatgggaaatcccaagaaccattataacctgctaaataacctgaaaatccaacaagcattttacctaatggaggatgaacatcatgataaaatgaatgtcttaaataatatgaaccaaatttaccaaaatgagcttcatcccaaacaacatttttatttacaccaattttatacatacgaacaaagaatgataaaattgtgaataaaattggagctaaataattttctaaattaagtaaaaatggagttgaatcagttgttgaattagaagatggaataatatcatcaaatttagcaggttttgaatctttcttagctaaatttataagtctttctttcatttgagattcagtgatattattgaggtatcattatcactatctgaatccaaagagatggcaccctttttagaacgagacattatgatctttggatgaatatgatatattgattaaaataggataaaattaaatgaaatgatatcaaaaaatcagaatatattacaatataaaacaccaaatataatcaaattgaaagaaaaagaaaaacaataaaaacttcaacaaattgaaatagaaatagaaatagaaattgaaaaagattcaatacaattcaattcattacaccgtgtcctctttctttcttttatttctttctttctcactcagtatgaaaaaaaattattattattattattattattagttaataacgcgtttattcttttaattatataataatagttttatgaaaaaataaaggggtcaactgggaattgaacccagggcctcctgcacccaaagcaggaatcataccactagaccattaacccttttatgtttgtttatttgaggggtttgatctgctagtcagtggctgtaattacgtaagcaggatgttgataagtcaatttttttttctatttttcaccatttttggtgtttcaaaattcgtcaatctaaaatttcaataacttcttagatttttctttctactggataaatattgaatagcattatttattagaacgactatatatatatatatcaactataaacaagtaattaaaataaacaataactaaagtgatctgcattcatgaacataccaataaatacaacactgaaaaaatttttctcatctgcatcatactagtcaaggtggttacttgaatcctttctaataatctctatgttcaatcaaaaagttataggaatttctacaacacttctgctagcagcttttgaagctgaacttgttgcaggctaaagaagcattacatgtagctttggcctacaacataacattcattgagagattttggttatgaaaaatgtaaaaattatcatgcattgtgataatttaccggtgattaatacaatcaatggtacttaccaagacaatcaattaaaagaaaaaaattggcaaaatacaattgaaagattaacatggtattacaaaactgaaaaattttctatccaacatatttctggaaaattaaatccagcagattggttaaccaaaacattaggtttaacgaaaatgagagaatcattggaggaaacagcattaaaaaatgtgttcagtttagaattttcaaaatcaattaaagaaaaagttgataaagagagtagagaaaaaaggaaaaatgataacaaagctgacattttgcactccccccggagatgttttaaatggtttcagttcatatcataaagcttatatgtgtttcattcccttcattatagcatgatgttaagttcaacgatatacactattttaataatatggttattccattaagctgttgcaatttatgttgttgatactgattctaattatgtttcatgtgtttctccatctgttgatttattgaaatgaacccaatcagtaccgaagatacatgattggttgcagatgtgtaaagtaaaagaattaattaacaaagtttaatgaaattcgtccaagatcctcatattaaattaaaattcaaaaaagatacctttaagtatcgagactcagcgaatgggcagtaagtagctaacagtttcaatgaaaagtttttacttaacagtaactattattatatgaattacctatatatagtcttttcatagagtatcagaactcaatatattttagaagatttattacaatttacaaagttaactgatcattaacatcttttttggataaacctatttaccagtagtacacatttgaaatttattcactgattaaattttatagaaagtgttttatagcaatccaagatctaaagtatttttttgtaggacaaatgccaatcttttcaattacttctaattgtcccggataattactctttattgattcctcaagattaactcctaatttattgcaattaatagcaatatttcggataaaccctatacccgctttccctatttttctcataacattctttaacatgttcacccatagcttttattatcaccacttgatgtaaacaatcaataataatcgttaatttccgatcacatccattgacattataaaaacattcctttatggtagttgaaacatagtttaaaaaactttttggaagaataggtcttttaaaatttctcattctcattaagaacccactcaattcttgcatttgtggaaaagacaaggcacaataatctcctggtttcatattattgatcctagccgcttgttcatatcttaatttcaaaagttctggaggtgtaactatgctgtgattaaataatgtcttgtaggcagtaaaaggatttgatgtttcatccaatgttgtaaaagaatgtttccaagttgaatcaatagtggtcattgtttgatcgccaaacttatatttgctcttagagggagcaaaaattatacccagttttttaggatctatcacacgcttaataacataattatggtatctaaggtatggaaattcttttagttgtttgactgggaaaaatgaccaacttccaatacttaaacaacgatcttcataataatcaaaagtatcaagatttgatggaaggaaatcgtaaaaatattcatcattttcaatacgaaacttgggaacaaattacttccttttttctcgttaatttggctaaatcaagttccacttctggctttagagaaaggtctaatggcatatttgattctttaaacattagataatatttttgttggtcttcaacatcaagaagctcccaattctcagtaacaagatctctcgttaaagtcattcgcaatttgttttgattccatttttagttccttctcagtaaacaaatgatcaaaatcagattgtttaaatgatccacccgtgacctcattcatcaatatctcccatatgttcatgttttcccattccgaagcaagttgttcaaaagcattggttaatttacttattaacttgatgtgttcttcttctggcgattaaagtaagtattatcacatgttggtttcccaccaaatccgtattttaaaaattcttctcctgttaaacatggggtttcatccaatcccgttctattatcaatatgtaaatcatcactcgagctgtctggagtagagggcatactttagccttgattaaacatatatctagaacaatgctattgtaaacgatcaaagattaccactgtctataattgctgcacaatcatgtattttttttacgtgattgttatgtaagcatgaacatgttttacgcgtgattcattttggcgactcgatagtttgaaatttggaaataatcctatcagcaattagagtggttttggtgttttttaatctaataaggtgttctaatttgttcatagaaatcccaatgagttacacagatgatgcacctttgtttttcctatttttaagggaaaaagtaccaataatactggaatcagatataaaatgtaaatcttcttttactattaaaaacgtgcaaaatattctctacaaaattatcaaatctttttaccaagataatggggaggctttgagtgaaaaaagatcaaagcgttttgcaacaggtacaacttcaaacttcaatcttttttataacgagagattagggcaacccaaatctagtgatattcaatttaatgaagctattgataattttattcaaaatcagattaatgatgatattgagactcttgcgaagaaatatgggtctagaaatgttaataggagaaaagctaagcttatttttaaaaatttcaaaaatgcaaaattaaccaatagaggttctttactggggcttttaaatttatacggtttgaatcttgggttcttaactacactgaaagctagtgcaagaagaagacttaaatttgaagatttggaaaaaattaaagaatcatcattcgatttcatgaagttaaatacaaagagagatcgagatattgcagatacattgaatgacatttttaactgttttttcaatgaaaaaggatgggattacaatggtataatagattcaccattcattggaataaataattgcgacagatacgaaactgattacgttttaactagtgatgaatttgagggtgcttctgatgaagatacttcatctgaagatatttcatctgatgatacattatctgaaatgtcggtagataatctttcaaattctaataatattaatgatcaagaggttcattctgaagctcatgaatttccacctataggcgtgtttccaatttataataataatgatcatgaggtttcgtagatctatgtcattaatttatgtttttagtagttcgaaatatacattatattataggaagtaattccaggtgctgtgcatagaacacataaaaatatattattatctgtacataaaagataagtgttttcaaaaacttttcacacacatggttttttattatccaatactggaactttgtgcagcgttcaaaatggtgatttacatcatagatcattaagagtaaataatacaaaacacctttattgaattgtcatgttcattcaaaaacaataatgaatacataagtttttgcaattatatcttaaatttatcctcaaaaccttgtaaaagtaaaaaatttatacaaactttttttatcataataatgcaaatacatctggttcaaacaaagagatcgtgaaaatttcaatcactgaaacgatggattcatgaaataaaggattcaaaataaaagtgaatgttgtaacacatctggttcaataccaacattgttatatttacacaagggataacccttaattatagttactgaacacaaatttttttagatttttttgaatgaatccaagatgcaagacgtttctttgtaggacaaaatccaatcttttcaatcacttccaattgttcggaataattatactttatcgattccaaaagatcaattccagttctattactttgaacggctatattttgataagctcgatatcccttttccttattttttgtataacattcttcagcatgtttacccatggctttcataattaccactctatggaaacaatcaataataattatcaatttccgatcacaatctttacaatgatcagcaccatcaccggaaaatgagcatttcttcttagcaactgaaacatattccagaaatgttttaatagctgcagtccttttatcatcaatcatactcattaagaacccactcagttcttgaatttgtgggaaagttaaaacacagtaatctcctgatttcatattattgatcttagctgcttgatcatatcttatctttaaatattctggaggtgtgacaatgttgtgtttaaataacgattgatagactgctattggatctaaagtctcttctattgttttaaaccgatgtttccatgttgattcaatgatgtcaattggttgaagaccacaatcttttctcattatcgaaggagcaaataatattcctacttttgtgtgatctactgcagtcctaagaaggtagttaaggtaattcatgtatggaaaatcatctctttgttcaattggataaaaactacaacttccaatacttagacagtaatcattatatggatcagcttgctgaatgtttgatggaagaaaatcgtaaaagtattcatctccttcaatatgaaacttagaacaaattaattccttttttttccccaagtgtattaactgaaattcttctttttttggatcaaagtttaatggcataccagcagctctaaacaaaagagcatatctatctctatctttcatgttgagaaaattccaattttcaataacaaattcctttgctaaattcatcattaattgtttatcatccatttctagttcttctttagtaaaatatgaatcacactcagatattttaaaaacaccacttctgtattcagccatcaatacatcccataagttgaggttttcccattctttagtaagtctattaaaggcatttttaagatttgttcttaaacgtatgtgttcagatgatgataacaactcttcacgttccatcttattggtatcttttgatcttctaagggaatgttgaagaccatatttgaaaagttcatcaaatgataattgttgcttattattcgaatcttggggatcagcaaaatcattagcttctgtatcagataaataatcagctggtgtatcagaattcatattgtatgctatcttagagtattacagtacatatactatatagaagggaaagaaagaaagatagaaagaggagaaacgtttatgttcaagatctatgattggatatatagacagcctatatcaatggattatagaaacagactacaatcatagattatgtaatcacattgaatttagatgcacttattatgtaatcatttaagaaattttcgcacttacttactatgtattatccctacttataatatgttttttataatatgttttttagcgatttaagaaaatttccctgaatcctaagtctatggtttccccctcaccagtatctcataaatatcacatttgtagccgcgctcttcctctatccaatcatgtacttagtttttgattccagtaagtattggtggagttatgaacgtttttagtttgaaatttgcctttttcgacaaagtcctgtaagatggtcatcaacattgagtacttcggacatggctcattgaaatctcctctcttggttgtaccggaaactttaccgttatattgcttacaaatagtgcagtatttgaaaaaagcttgatgaagttagtaaatttttttgtgctatttttcgacacttttttctgattttttaaaaattgggattcaaatcaaaaaaagtggctccatagtgcactaaatattgtttttctctttttaatgggactattggtttttttgtaactgttctattgaaaacataaaactgtaccggaattaataataaatcaccatacaaaatcggtgttaagccacaacaaaacgtgtgtcgtgattttggtgaaaaaaagctctttttcaagagaaaataatcaaaattattacgtaagattataaattgtaattataagtagggattctacattttccaaagggaaatgattgtctacacgccgaggagaattaatattgtatattagaagatcataaaaaagtatcccccgtatgtttcataggtctatgatttttatttgtttataatagatagtatcaacaaatagtataaattaatacaaagagctatacagagaataagtaaaaaaaacaattatgtgtgagtaaaatactattgtcctttgaaaaaaattaaacgtatcttaatgtagtgttataaattaacattaaaataattaaactatgcctgaaaagcgttaaatctttgtacagaaaattttttatcttggtgcttacgtaagctaaacaaccaaaacagaataaaaaagccctttaaaaaacatataactgggcgtgtggcgtagttggtagcgcgttcgccttgcaagcgaaaggtcatcggttcgactccggtctcgtccaatatatttttgtttttttatctataacataacgtattacataatagccaaataatttttgttactatattatattacaattaacatgaatttcaatggattaatttgaatcttctttttttcttacaagtttatacttttcttagctcattctatacaaatcatgggtaatgcagcatctaagaatagtaggaagtttgttcaaaataaaccaaatatatcattaaagaaaaatgagaaaatttttacaactaaaccaccatttgaattagatggtgaagaaaattctaattctaataatttatttaataaagttgttaataaaggtattgttaatataacagataagaaagctgaaatgaaatttaatgagaatcatgaatcaattcaagttttgaaaaatcgtgttaatattgagaaacaatatgaaggattatttataccaaaaaatgctgatttacctgatacacctgaaagatttttgaaaaaggaagatattgacaaaatcaataagattaaaaaaattaatgtaaatgcgacaaatacttatggattaattgattcaagtaaattaagtgaaataataactaattataaagttaaagataaaacagattttataggatttgaaaaattacaaaaattaattgatgatggtataattgatttaccaaaacataaagttacattacatgaaagtattgataatgaaacaaagaaagtaaagcaaaaacttatagttgttaaagataattggattgaagaaatgaaaactaatggtgaagttaaattaagtaaagataaagaaattcttgaacaatttaaaatgcttgaagatttagttagtaaatcacaaatcggtaagaaggagaatgaagagaatggagaggaagaagtcgtacttaatagaaaaccaaagagagtatccaatgatgttaagaagatggtgtagtgtgtagattaagtgtgtaaagctgtatatagtgaatgtttacgtaatttttttaaagaaatagattaggtaaatataaatcaacaagcaagatgaatattattgtggatatggtttctttaattaagtaagtatataagatgtctgagatagagtatgatgatgatgaatctacagtttcatttgaactgtatgaagatggatattatagagataaaataataagggaaataaaagaagaaggtgaagaatttgaagttggatcattcctattaaaatattacaaatatcgagagttgggtgatttatctaaaggttttggaagtttaattgaaggtattaatgaagaattaattgaattagttaatgaaaattatttaaattttattaaattaggtaaatcaattgatggatcattagatttaattcatgataataaaattgatataggtgaatatttgaaaaatttaaaattaagtaatgaaaatattgataaaagtactaaaaatataaataaattaaataattatagatttgaattaaatgaaatgaaagttttcatatcaagattaattaaattaaataaaatgattgaatggtttgataaattatgtttacaatttgatgcaaatgagagaagtggtgatatgatattagaattagttggtgtttatttaggtataaataaaatgatggatagtattaaatttattgaagagaatattatatttgataatatggttaaaaagatgaatgcattaagagttgaatttaaaagtcttttgaaaaattatcttgataaatttagagatttagataatgatgaagtatttcaagtatttaaaatgtaccaattagttaaggatatataaataaaagtagtggtatatataataatatatttagaagaataagaataagtatttaagaataagtatttaagaaaaagcaagaacaataagagtaatcataatgagtatatgcacaaatcaaatttaaacactccaaccatccatatttaaactattatgaacatttgcttgaatatctttccatatagccaatttatcattttctgttatcgtttttttgttcaatattgccttttgtaaagtagtgttatttgatttatgttttgcaagtttactcatttttagtttaaattcaattctacattgatattcaataccaagatttaacataaaattttcaattatatttctccattcaaatttgaaataacaatcatattgaatattaccggttaagttattttcattgaattgttcaggttgtacatcgaatgaatcaattagcatttgtttatgtcttcttctagctcgttcaactataaatttagcagtttgaactctaaatgattcatcaaattttgcttcttcataaatatctgaatgtgcaagataatctgcaatcattggatcaggtaaatgaggtgggataatttgaattcttaaagttttcggagaagaagaagatgaagatgaagaaggtgataaaacatttggtattttaccattccattcaggacgtaattgtggatatattagtaatgatcttacatcattaatttgccaatttttaagtggtcttttagtaaatactggtctaccattagaaaatctagcaacatctaaatcaggtgaataataatcagtaaaatctgtgggtataacatttgataatggtaaagtatttgaattatttgataataaagttgcattagttgaaactgtaacatgactaaataatgatctatcatccatagcttcctctaacgatcgttgttgagcttctaataaagattttgcagcatcagctgaaagtgaacatccggaccggccggaatcaattgatgatgcctcatctgaatcaactatattagcattagccgttgcttgacgtagtggagaattaatgtattgagatttattatgttgtatttgagagtgttgttgctgtatcacttgaggatgttcctgtattacctgtaatttagatttttgttgattatgattatgattatgaatatgactgtgaatttgattattttgctgtttctgtaatctcatttgagccaaatgtgcagccacatgttccctggcagcattctggaactcaggtggcgttcgatagttatcactaccattacggaattgaatgtatccgaacatactatactcccagaggaaatccaaaagaaacatcatacagttcccaggctaagtaatcgtgatattaataaattgccccacactgagaaaaattaaaaattgcgttacatggaaatttaaatttatttaatttctttttcttaaaagctttttctttttctttcttttcatttgacaatgtcaaattggtctaagctacagaagaagaatgcgtctcttaagaaaagtaagaaagtagtcgacactagagtaaaacagagaacctctcttacaactttagctaaggaacatatacttaaaaatactaaaccacctagtagtttagcatctacaactttaaatacacatcaaagtgcaaagataataaataataataataataataataataataatagcagtacacaaaatacccaaacaaccgcaaaagttggtaaatttatagcaatggattgtgaatttgtaggtgtaggacccgaaggtattcaatctgaacttgctcgtgtatcaattgtggattttttcgggaaattagtatatgataaatatgttcaacctcgtgaacgtgtcactgattggagaacttatgtttcaggtataagaccttcagatatgcaaaatgcaatatcctttaaacaagctcaaaaggaagtttcagatatacttaaaaatcgtgtccttgtaggtcatgcaattcatcatgatttagaagctctttatttaactcatccacgtaatgatataagggatacttcaactcatacaccatttaaaacaaaatattcaaagggtaaaactcctagtttgaaaaaattagctgcagagatactgaaaattgatattcaatcaggtgaacattcatctgttgaagatgcaagagctacaatgttaatatataaaagtgatcgtcataattttgaaatcaaacatagaaaatagtgttaaattaatattttataatatataatgtcttatctatatgattaaaaagaaactgtattgtattgtattgtattgtattgtattaattgttcatatcatatatcatatcatatcatattatattataccaccatcatcggttcgtaaactgtccttataaatctctccaatattttcaagtaaatcatctaaaattttaaatctacgtttcttagtctcaagtggaactacactaacaccttctatattaacctttgtggtactgaattttgaatcaattatacctgcaaattcagatgcttctctaattttaccctttgttaaattctcactatatttattattgttcatcaattgtacaaccatgtctaaaactttctctaataaattggatgttgtacttgataaaacaaatttctttaatacttgttcatcattactaaataattcaacaacaaaatctggattggtcttaaataattcaacatataatgtaataactctggatgttgcaatttcatctaattttaatttcataaaataattagatgctccaatacatgtagtataaacattcaaatttggtttttcaaaccattcaattagtaattttggtatcatacaattattattaccaattataaattcaatattctcaaatccacattcttccattgcttccattaaatcttcatttgatgtacatgttaaaaacaggaaaaatagataacatttataattatcatcatttttatccatcttactttcataatacctaacttttaaaagttctttaattgttgcaaccgcctcagaatgtgtaaatggtgtttctaaacctttacagcagattaaaatcaatatagaatcaaaattttctctagtaatcttgaaatcaaattcacgttcaatcgcatcaacatattcaatcaacatttttcctgaatcaaatatataatcaatcatcttaatgttttcctctttacaatgctcactaaatttagaaattgtaatcttaatatatcttgcaccatatttataaaatgtaatattatcagtcaatataactgttaaatggaaccaaaacattaatggattgaaaatagatttataattaacaccttgaattgtttgttcgaatgcatgtaatgaacaaaccattaaatttaaatttttggataaaataggtgcatcattactatcaacatattgtaatccgactttccttaataattcaagaatttttaataataacatacctgaaataccttgctttgaaattgaacctaaaattaaaattgctctattctgtagttgtaattcactatcaaatgcaatcttacatatacaagaactccatttaatcatttgtaaaatataatcttcaggattaacatcattctttaaaaatttagtcaataaatcacataaggtaataattgcaacacttctattagaaacttcaatatcaaaaccatcattttcattaatctttctatcatcttctctagttaaaccaaataacattctaaatcttgcaccatttaataattcaatttgatccttaattagtaaatgttgttcagctgttaatgttggtttagataaatatgaatggaatgttctagttaataaatttagtaaacattttctaagttctaatggtccataatccatataaatggtaacaatgtagaaaatatcaccaatatatctatcaataaaaattaatgaatcaaataccaaataagataaaaatctagccaagacagttgtttcaatccatcttgtatgtgcctcaatttcactttcattatgtttcatagtatatgatttttccttcattctaccaatgataacactacaaatttcaactgatgatcttaatggccaatatcttgtaattctaaaccaatcatgtccttcagcttcatgatcaatagatgctgcaacaatttcatcaataataatttcaattaatccatcctctaatgataattgtggccaaatgaaaactgaaaaaacttgataattattttcatctctacttgctctaacaaattttctaattaaatcattggttctagctggtccaccaacagaatgtgataaataaatgttcttataaatgtttttaacccaaggtgaaatacagagtaccattgattttttattttctacatctaatttctcaaatgatgtgaaaaatccataaaggaatgagtatgataagttcggatgatttactgcaatactatttgaaacatcacaaatataatcaatatcaccatatgggaaaataaccccttcaatatgttcaataactttatcagttttcaaaccaacactttgttgaattgatgataataatgaatatgatgatttacgaacttcatcagatttagataataacccagaaaatgaaatattcaataattgtccaactaaactatcattatttgatccaataaatgcatcttcattatcacctgtaaataaattaccattattgtttaatctagcctttgaaaaatatagggttctcataatttcaatctttttggttgatgtgaatataattcttttatttgttttcatatcaatcattgaaatttcattagcaacacctgtaaatgaacttggtgaaatatcaattagttcatttattttataacaatcaaccatgttgattatatgcattttattaacaagtttaattctttgcggtagggctgaagtaacttgtacgaattgattaccaatctttaatttaacaggaacaaatctattactttcctcttgataaatactaacatcatggaatgtaactctactgtcatgtgatacaggattgaaataaccaatcaatttgttcttacttaaagtcctactatcatcattggttgataagaaaatatattcagaattaacatgagagtcagttgatgcaatctctaaccttttgaaaacttcaaaaaatttactagacatattcatgtaatatactctcttacaattttccacatatttatcaggaacaattgatcttacaatatctctacctctttcaaataactcaaaattattaaacgctgttgcatccattaacatacaataaggagtttcccaaaatttagttaatgtttgtaataaattgtaaatatatttttctggcgttaaatcttctggaaattctaatgtattgatacaaattaatggtaaaccatcctttgtaattaaaaccttaataaatgtaacatccgacagtgttaaattagttcttgacattaaatcatatagtaatataccttttggagacttatcatctttaacagtttctggaatttcgtaacctcttactcttctaggtaatccagtattagccaaaataaaatccattttcttaatagtttcaattttactttcaagagtaatatcatatccaaacgattgtgataaataagcttttctaatttccatccaattactgtaaaagaatccatgtaagaaaatacctgaatttgattcatcatatttcatacttaatatttccctttcaatacgaatacctctttcatactgttcatcaatttcatcaatttgaatagaattaaatttctcttccatattaaaatcaacgacttttttcataaattcaaaaaatttacccttagcataagataattcatctagtttatcttcaattagtggtaatctaacagcagattcatttacaattgtttgaataactttagctaattgaaccagagatcttttaaatttcaaattaggagaatcaataatatctgatctttcaggtgcaacaatggttggattgattaatcttaaaaataaataggcattgattgatgtatatttactatcatgtaaaacttcagcagtcgtatcaaaaatagtttttgcaattaatctaataccagtaggcatattttcaacagaatcatataaggaatcagcaattaaattcaaatatttaaagaaaagtttgatattttcttcttttgttctagtatcatcttcattaactctttcaatttcaaaaaattcagatgaattaagcatttcttcaaaaattggtctaaaaattgaaattaaatactgtttagcattatcatatgagtataatgcaataactctagtaccaattgtatttgatcttaaaatttcatttttatcaaaagtgtgtaaaatatcatatttgatcaatgaaataatcagttttaatttatgcctttcattaattttaagttgattaattgcagaggcataagcttcaattttagaatttggacaacatgaagcagcagctaagaataaatcataatcatctataaataaatcagttgcaccaatgaaaagtgttgttctagaaacaactttttcaaatctcattgaaatatttttaataatatttgaaaaaacatcaataaatgaaattctaattaattcatcagtatgataacctaaaggtaatgaatattttaaaccaattttagaatttgcatttaataaattaacctaatgcttgaataacttctttaatgatatttgaagaattatgtgtcataacattaaatgttgtttcattttgagaatttttcatttcatttaatttttctaataatctaacaaataaattaaaataatttgaaaaaacaacactcgcagtacttttatcatcatctgatccaccataattatgtcttggagtatctaatggtaattcataaaagataattttcaacataactgaaacttcaactctaatatccattaataaatcctttaattctgattcttggaactctttaattttacttgacattttcttaacatttgcattatttatattactgtttgaattggatttagtattaaatgttaaaactctagttcttggctttttaacagaatctaaatcaaatgaagtttcaagataatctgcagtaattctagcatattgatttttagtcattatattaccattcagtgataattcatttaatttttgtaagaaaataacttgtaacttacaaaattttaattttaatcttaagaaagtcaggtgaagtattctcaacattaaacatcttcattaatttgtaattaacgttccataaatcaactgcaatcataaataacgattcactttcaagttgaataattgatcttaaaacacttaggaaaatttcacatgtattaaattcaccattttttaaattaatttcaaattttggtaaaaatctttcaatttgtgttaatatcagttcagataaatatggatgattagagacacttaaaatttctcttgcatgttcacgttttttaacatcttttgtaaataaactaataaatttatttgatatgaatctttgcaaattttttaggtaaataggctgtcttggatcatctttgaattcttttgataatattataccacctaatgatgctaaatattcacaatatatttccatatcttcaacaatgacatgtgtttcaaaaaatttatcaatttctttatcactcgaattaagtgttggaccattttgatagtcataaacaatcgcaactttttcatacattaactgccaaattgttattaatgttgaagttggtttcattaattgacacagatgatctcttaattttttcttaattgatacaataccaaatgtcattttatcacctagtatattggttgctaattgtaaatttgaattatcaaaacaatctttatgatgatgattatttgtaataacaaaaacataaaactgtaataatcgtttagatattctaatagtttcaagattacttgagaataaacccagaaagacaattttttcaaaatttgttataattctacgacaaaaatttctaccatgaaatgaatcaattatatgacgattttcatacataagttttaaatctgaattttctgatcttttctctaataaatctaaaactaatctaattattctatttcttttttcatttgtaatattagcagaaataccaactgatgaaactgaatcaatcataattgatgaaccaacatatgcaacaaaaactcttattggaacattatttgcaactagtaatacaaaaattcaataaaagggattcagcttgcactgaaaatttcatcatcatctaaatataataaagaagtaactctactcattaattttctgaaatattttttcaaaagtaacaaaatcaggattatttggatccctttcaacaggtaggatagcaaagaaatggatatgaactataagataattaataaattaattaaacattccttaagtgttgcaaaatcatatttattaatttttcctttcgattaagttatatttaatatcattacccagattagtttcttgatcagttaatttaaaatttggcagtaaaggttctgaatcatcacttaattcactacttgttgaatttaatgaacctgaatcatcaaatggatttgaacttggtgactgatataccttcttttctatttttaattaattcatttttaattctcatattattgagtcttttacaaattaatgacattattttaattaatgaatctgataaatcttgaataatttgaaaaattttatcacttaatgatgaagttaaaattaacattctaagtgaacctgtaaataatgataataaatctgatgaatctttggaagattttaataatctattcaaagttttaggtaaaatatccatattgacaattgcattaattgcgaaaactccgatttttaattcatgaataatttttttattattttcatttgaaattgaatcagtatcattattatgattagattcataatcttcactacttagggatgaatttgatgaaagtgatgaatttttattatttgaaactagttggactatgactatttttatcatctgagaatgaagatccagatgatgatgtaaatgaaggtaaatgtagaaaattagtttgtaagttatttgaatttgatgatgaacttgtattattatgactgtgatgatgatggtgatgactagtattattattgtgataaagaaatgaatgactttgaccagcagtagtttgtgtcatacaaatctatattcagttgttttaataaaggatctttcaagaaaagaacaaattgatataaaggatgagatttatcaattgaaccaactgaacaaccaattaataaaaatgaaattaaaggttgagcagcatcaggatttttattaattaattgagtgaaatcagataaaaatttttgtttattagaatttaattttgcgacacttgaaattgaacgtttaattgcttgagttgttgatttatttgatttttcatttatgaatttagttatttgttttggttgtaataataataaacaactcaaaattccataataaattcttggacaatatttataatcaatttgtttatataagaaatcaaacaatatttctgcatttttagagcacagactatgatcaggagctttaataaaatcatttgttctataaattgcccaacttaatattgattcagtgaaaaaatgtaaaagtaaacttcgttgtgaatttcttttagttatatgtaaaatatcttttataaattggatattagcattaaatttagcagttgttatgaatgaaaattgaatcaaatgagaacctttaatatataaactttcaacattgatatgtttgaaaattaatttttcaaaatttaaatattgtgattgattagttgcagcaatatataataaaattgaagatactgattcatcaattattgaaactatttcataacttttcaattttgatttttgtagtagtaatttcttaatttcattaaaatcatccagggaagttgaattattatcaatagtattattattatcattaccactactgctactactttcatcaattaaagaggaagttttcgataattctgaaataggagtatagctagtagatgcagctttagatatagaatcagcagttaaaaattcagttggagataaaggattatgattaattgaatttaattttgaagttgataaagaaattgaatgagttggttcagtaattttaaataaagtagttaaacaagttgaatcatttttgaaacttaataataatgataacaattttgtacataaattttctgacagtattgaagtaggagttgaagataaatgagttttaaacattgttgtagttgttgttttcataccacctctactaaatatactaccatttaattgagataaagtatcatttgattttaaatgatttaaaaagctagccagtagattaataaccacatataaagaattaagagtattgacacttttatcatataaagattttgaatttatatcatcagcctttaaaatttttattaataaattataaattgaagatactaaatcattaagataattttgattaaatgataatttcagcagatgagatttaacttgaatataagttggatcagctaatacttgatcatatgaaaatcttgatttataaggtaatatattatcaattctagtaaacattacttcaataattaaattttctatgggtacgaattccaaattaattttagataagtttccaactctagttgaaatagataaatctgaactcagagatgatgaagtttccattgaagaatcagtaattgaagtagtatttgacattgtactactattattattatttttaatactatttgaaattggggaagaactttgagatgactgatttatgtgattagaggatatccctgatgattttatcaagtcttcctttctcattatttatttatatgtatatatatatatatatatatatattactatatatacttatattataagaatgaataccaatagctataaacaatataaaaaacggatatcaaaatatcagaacagtttatgcccagctattaaattaataagtcttcaggtgatgagcatttccaacggctgttaacaactgcaaaaaaattcgccactgaaaatataagagaaaatgcaaaacaaggcaataaacccaccgacgcatcgtcttctcttttttataataaaaataaacgcgatctctctaagtatattgttatgtaaacaaagttggcaatcaacatgtaaacaaagtgatctctccattagcctagcatgttttcatttcaattgctattgctatttccattttttattttatttttattttcttttctatcttctacgttctctttcattattctctatattggtattgacattgggatagcataatatatcatataggttgatcactttcattacttttctaaatgcttaactcatctccttcaccatccaaaaataatattatggatgatgctattgatgctgctttgaataatcataatagtactaataaatctaacaatcatttagaaccaacaatagatcctcaattacaagatgatgtagtggaatccttattaactactttaaatcaaaatcaaaatacaaatactaataatacccccggtcccaaacatttaagaaatttatcaaatagtaataataaaatcccattcttgccaattcaaaatttaaatatgaataaatataataataataataataataataataataataataataataataataataataataataataataataataataataataatatcaattcaactaataatattgataacttcaaattttcaatggaatcaccaaattttgattcatttataacatttactccaactttattgaataaaaaaaatactaatacaattaatgattcaatattttcattctctccaggttttatcaatggcatgaatatgaatatgaatggtatgaacatgaatatgaatatgcaaaacactccaaataataaaacatttaatgttgaagatttatttgatactccatatattaataatctttattcaactattaataatcccaatttacataataatattaataattcaacaataaaatcttcatttgatacaccaattagtaaactatttgaaaaaaattataatagtagcttaagaaatattaatattgttagtagtaatttaaagaatatacgagattttgaagagaaaagtgtttcaccttgtgataatcataaaaaaaatttaattaatgatgatgaattaatgaaaaatttagatttaaaaacaatgacaagtacaccaagttgtaaatcaaagaaatcaattaacgacactaatactaatactactaataataataatcataatgattcaattgattcatcaccatcaacaattataattaattcagttactaaagttactggaggtgttaatttaattgaatgttcaccaacaccagataacaaagatgataataaagtacgaattaatattaatttattaagtaataatcatagttcatcaacaattatttctaataatacaataaacacagtaaataataacaatattaataatacccacaatagttcaataaatacatcaccaccttcaatacctgttatgggtattttcaaagaaaatgatcctaaggataaaataaagaaacaaaaacaaatacaaaacaacaacagatacaacaacaaaatacaaatgataaggacaatataaagaaatttagatatcaaaattcatttaatgataaagagaataagaataaacgtaaaaatcatggtaatgataaaattcattttataatggcagatcctgatcaattaaagggtaataaacgacgtaaaaaagttttgaaaaataatacaaatatagttaataatcgtattaagaaaaattcagagagtaacaatatctttttagaaaataaataatacagtgtatatattattatatatatattagaataacaatactatctacgttttggacctttaggtttattaaaacgaagtgaacgattatcagttggagttgcttttttaggtttcaacttcatcttctaaaattaattcatcaggatcaccaatttcaatatttttagtaaatgtataacctaatttggttaaataattaacaaatgcatttttatttgcagctaaaaacattctttgtctaatatttgaacctgaaggacatgaaagtatgaaaaaattattataaatataatatgatggtgaatcagttgataaaaatgattgaatattatcaattgaacaattagatgatgaatttaattgaatattttcattatcaaaagttatatgttgtaataaattctcagtttgaatatttgattgtaaaatttcacgtatttcatcaggtattgaaaataataatttactattattatcattaacaagtcttgcatttgaacttgtatgtataggtttatcaattaaattctcatcatcctctgaatttgcaatttcatttgatttaacaggtttaataaattgatcccaattaattcaaatcattttcatcattagagaataaaatttgtgagaaatgatcagtacctaaacctcttaaaaagtgcatttctcgtacttgcatataacatttttctctcttacctggtgtcgtatctggtatatatgaaacaaaatacatgtttattagcattgtcgttatctgatgatataatataatgagcatttgaatgattaatgttatttaattgagattgtgatgcatctaatgataattcatcattaatacgaataattaatggtgtttgaggtgatgaaagatattctttaaaagaatttaaagttgaattagagggtgatatacctgattgtgccattgattttgataattttagtgtctattccagtaacaaaaggcagaagattgtatgataattcatgataccaatgccgtgattgccgtattataataatattaagcttcgcgataataccactctcttattatagaaaatatttcatttccatttccattgacacttcctctaattaattgttctcttttgttcatttccttaatattctcttctatacttatagataatggatcacagtagttcgggtatgtccaatttgggcaggaacaatgtaccaacattctctccaactccttcaagagttttctcacctcaacctttctcaccacaaccattttcaccacaaccattttcaccacaaccattctcacctcaattacaacctcaacttaataaccaaagtcataataataacaatagtcatcataatcaaccattttcaccacaacagacattctcaccacctttttcaccaccaacattcacagatttaccacctttccaacctgaaacagagctggctcttaatacatttacagcagatttacagacttttgcactttggttaagaggtttgacacctgaacaacaagttgcagctgcaggatgttttagctgatgcattacctcaaagaaatacaagatcacgtattgatatggttccaaatagacctttaagtcctttattacttgattcaatgttatcattatcattagaggaatcattatctaattctactactaccaataataataacaataatagtattaataataatacttcaaatattcaaatacatcatccacaaccgaatactaataatttgaaaaatttaactaaaaatacatcaaataattctcataacacacagaaattaacgccatcatcaggatcagcacctgcatcagcatctgcatcaaatggaccatcacagttaacatcacttacattattagaggatattccacaatggttgaaaactttacgtctgcataaatatacatcatcattatccaatataccatggcaagcccttgttcaatttgatgataatgaattacagaagagaggtgtatccactcttggagctcgtaataaactactaaagagctttgccattgtctgcgctgagcgtaaggaagacattgccacctataataacagtaataacactaaataacttatgtaatcaatataatactaataattactaatattttgaataaactccccctccctctcaaatattgcacatggcagtgtgctagaataagagctacttacggatggtcctatctcgagtaccattcctaatcaggtaataccggttgttagtcccttcccactcatgtcctggactatcgaccctaagtattaccctattaggtatggcccgaaattcaggtatggttaattctagcacagtgagaccattaaataacaaattatcttactttgttgcatgtttatcttctttgattgcctttttctgctttcctttaagcactgttacacacaattaataccacaatatgtcacatcattctcatattataagctacggcttcaataggggtgtaacagatactttaaatataccttcattcaatagtaaaattgaattatttacttatttacttaattatagtacaaatattgaaatcaatagtcaattagttatttatttaaataaatcaaataagaatattaatattgatttatttggaaatttattacattatagattttactatctttaccccatcataataccctgctctgaaataattattgaggataaatcttcaataaatgatttaattaatacatcgttataaacgtatcctttattggatttcatctgatattgaaaaacctttcactatttacacatatattaaagaaaatttaccatcaatagataaaagattattagttgattcacttattgatgatgagatgaataatactagtactactacagataatacttcacaaaatatttatgaaagattatcagatattaatcattcaatagataataaaagatcatttaatcaattattaaaggaaagaatgtttttcgatgaagaattatcaaaagttcaatatcgtcaattacttaaatataccaaatgatgaaacttattataaaaaattaattaattcttgggaatttaatgcatttcaattttcttcagatgaattaatttacattgcttatattatattaattaatcatataactaatgataatgatgaaaataacagtatttcaaatcatttattatcattccttttctttgttagggataattatagaattggtaatccatttcataattttagacatgcaattgatgttttacaatcaactaattatttcataaatcaattaaatttacataatgataaaaatattaatagtattgatattatttcattattatttgcatcattaggtcatgatattggacatccaggtattacaaatatgtatttacaaaaaaataattgtcgttttatttattattataataaattatcaattttagaaaattatcataatacattatttcaaaatattttacaaccttttattaaaaatattaaattaaatttaaatttaaatcttatcaaggatgcaattctagcaactgatatggcaaatcattcaaaatttgttgaaaaaatttcaaatgaaattaataaaatttctaatacaaagaataataataataataatgttaaagataattttactttattagcatgtttattaattaaatgtgcagatatttcaaatgtttgtagaccaattgatataagttttaaatgggggaattcattaactgatgaatttgaacaaatttccatatttagagaatactgataaagttgaaaatttaccaattaatgttaaagattttaattataatttattatcatcaaaattaataaacgattatccaaaattaccaaataatcaattattctttattaatacatttgctaaaagtttttttgaaaaaatttcagtttcattaccacaattaatatttttacataatacattatcatcaaacacgatattttgggaaaatcataaagagaaaaaagatagctaatacgatgatggtgatgatgataatgatgatggtaatagatagctgatagatagaatatatagattattatagatataaattttgcatatagtaataataacccttgaaaaagtacaagttaaagaaaatagattgagaagtcatagatatgtagaaaagtgacttctcagttccaccgtttgtgactcttacacctttaagtatattatattgactctgtccctttgcaataccttaccaccttctttaaagatactgaatcctctttaaatggtgatattgatataatatagttttaatattatcaacaacacttgttcttttctataaataatatcgatatataatcaataatcaataacaatgtttgcattaactagaagtatcagatttactaaacaaaatttttcatcatttaaacgtttacaatcaacttttaaattaaatccaaattcaattgtttcaacatattcaaaatctccaattgttaaatttacaaatgaacatgaatggatttcaattcatccagatggtacaggttttattggtattactaattatgcagctgatgcattaggtgatgcaacatttattgaattaccaactcatcaaattggtgaagatgttaaaattggtgatacaattagttcaattgaatcagttaaatctgcaagtgatatttattctcctgttgaatgtaaaataattgatgttaatcaaaaattagatgataatccagaattattaaatgttgatccaatgggtgatggttggattgttaaagttgaagttacaaataatgattcatctgaattattagatgctgataaatatgaagaattcgttaaagaagagtaatcttttctttttgtttttttatataaccttttctttctttctttatacagttttttttatatattcataaatctttacttcatttcacatatatatcatttcatttactttcctcttcaggtgttttacaaacaatttgaaatccatgaatatcaggtatttcttcctttaaaataccgaaaactaatctatgtctagctaaacttttcatattttcaaattctttacttataattgtaacatgaaaatgactttcaactgtattacttgcacctttcatacctgaatgatgtgcatgtttccatgaatcattacgaatttctaacttatttggatttaatttactatttaatctttcacgtatcttagattcaattggtccacaattatatggtggcggagttttcaaaccacatgattgcatagctctaagtgatattctcatatagtttttgtataaaatgtaaaagaggttgatctacaagtaggtgaaattggggtaatatacagtggaaataatttaattttacaatcttaatgattaggtaatatttttccaataaatatagtcaatcgttcgttatacatcaatcaatggttcaagatagctatataattatagaaattagtaatcgttattgccatatgaatcattgtttctgttactatatgaatcattaccatatgaattagaattattgttattgccatatgaatcattgtttctgttactgtatgaatcattaccgtatgaattagaattactgttatttccataagaatcatcgttatttctgttactgtaagaatcattaccatagttactgttcattttgttagatccataggaatcattaccataggaggaatcattattatcattaccataagaattgttcttgtttgaaccatatgaatcatcgttatttgaaccgtaagaatcagagttctttttgtttgaactataagagtcgttaccataagaatcgttgttgttggaaccataggagtcattgttagaaccatatgagtcgtttttctttgagccataagagtcgttgttggaaccatatgaatcattaccataggaatcattgttgttgttgttgttagaaccgtatgaatcgttaccataggaatcgttcttttttgaaccataagagtcgttaccataggaatcgttgttgttagaaccgtaagaatcatttttcttggaaccatatgagtcgttaccataggaatcgttattgttagaaccgtaagagtcgttattgttagaaccgtaagagtcgttattgttagaaccgtaagagtcgttattgttagaaccgtaagagtcgttattgttggaaccatatgaatcgttattgttagaaccgtaagagtcgttattgttggaaccatatgaatcgttattctttgaaccgtaagaatcgttaccataggaatcgttattgttgttagaaccatatgaatcattaccaccaaatgaatttttactttggtaattagtatcattattaccaaatgattgattattatcattattttgattttgatttttatgaccaaatttaccaaacagttcctttgccttatcaccgtattcctttactttatcaggattttcatcataatattgtttagcttcattaaatttttcttttgcatcatcaaataaacccattgtgtattgtgtgttagtgtattgattataggaattgaattaaggtaatgtaaaaaagaaggaaacaaaggaaaagaaaagaagaagagatgaaaagcccaatttcaattaaatggagaacattaaccccttttataaaacgtgttattaaaatcgatcatcgatcaaagtgaaatatctaatgactttacttagccaccagatcgaagcttttttattcgtacaacaatttctttctctatttcctattgttgattgaattattactttatgtccgtaatattctataattcaagtctagaattaatactaataatatctacaatctgtattacacaccatgtcttacaatcactcatatacagctttgcattatctgctatatcaccattaaggtgtacttctacatggaaaccataaaaaccataacaaaacccacccatctaaccaacctcaacctgtccttctcattaataaaggcggataatgaatcttccgagaagtacccgtaaaaatcttttgattttccgggaatagacgcgaccatggcttgattactcaaaagagtaactgccccattaggaataaggtaaacacatgaattatttgatcctggtcttcccctttattctcttttcttaaaactacttttttttgttattattcaaagatttttataacatttggctgtttcaagttatagtcgattggtttcatacttttgtagattaaaaagttttgatttcctatatttatctctcaaaaaaagcaaccaaattatacttataattactaattaattaaacaataaattctatatcttatattaatattacaactctttcacagcataattcaaattaacccatttacgtaatattaatcattataatatagtatacaagacaagattaattcaatgacttcaccaataaggaaaacaccaagtgcaacaactcctaaatatcacagaacaattttcggtaatacaagtccaaatttagttaatcaaagtacaaatagtttatattcaaatactaaaggtattttatcacctaactttaatattgttaattcagattggaataatagttatggttcaaaatttaaaccaaattctaagaaagttacaggatcagtaataggatcggctccatcatcatcatcttcactgaggagatcaagttttaataaacgtcgaacttttggtgatatatttaatgaaaacaataataatagtttatttgaagattcaggtaataaaaagaaaataaaaactaatgataataataataataataataataatagtagtaaatcacataatgaccttagtgatataattaatacaccaaaatctaaacttaataataccaataccccaattacatcaacaagaaaattacgtcgaactaatacaaatgaattattagatagatttataccaaatagacaatcaacttcaggtaaattatcaattgaaaagacaaaatctttaccttcatttgcattaccttctgatcatattgatagtataacaagtgaaatttatcaaaattcagttgctgaggcatgtggtttagaagttggttcaagaattttacaatttcaattaccaccaccagaatctaataataataactaataataataataatggtaccactaataataccaccggcacatcactgagaagagtaacatcatataattcaagtttaaagactagacaaatgatttccaccaatgcagctcaagctagaatgaaaaaagttccattatgtcctgagaaagttttagatgcaccaggattaattgatgatttttatcttaatttaatttcttggtcaaatgaaaatttattagcaattgcattaaataaatcagtttattgttggaatgcaaatgatggtaaagttaaattaattactgaatgtgaatttataattacatcaattaaatggtcaccagatgattattatttatcaattggattagataaatggttcaattgaaatttgggatattgaaacagttacaaaattacgtacaatgaaatttaatttaaataatagaatttcatcacaaagttggaatgaacattttttaacaattggtttaagaaatggtgaaattttcaataatgatgttagaatttcaaatcatttaacaaataaatttgagaatcatttaggtgaaatttgtggattagaatggagaaatgatggaattcaattagctagtggaggtaatgataatatagttaactatttgggattataggaaaagtaaaccgattttcactaaaactgcacataatgcagcagttaaggcaatttcatggtgtccaacacaaactaatttattagcaacaggtggtggtagttcatgtaaaatgattcatttttggaattctaatacaggttgtagaattaattcaattgaaactgagagtcaagttagttcattacaatgggggtattcaaatggaattggtaaagaaattgttgcaactcatggatatccaaataatgaaattggaatttatagttatccaagtttacagaaaactggtgttataattgatgctcatgagagtagaattttaaatagtcaattatcaccaaatggtacaattttagctacaattgcatctgatgaaaatttaaaattttggaaaattttcgatgaaatgccagtagttaaaaaggatgcatttactacaagttcaagtggtaaagacatgggtaaagttatgaccattagatagttctatataaagattaaagtgtataataatttgtaacaaaatagaatagaataaaataaaataaaataaaatgaaatgaaatattaaaatttattgataaaataaaaatttcaatataattaccatattaggaaggtgcagacgaatagataagaaaatatttccagtattcatacacccttagatcatcacaccgcggttaatctactacttttacaatgaaggtatttaaacactgtagagtcctgtaagtaatggattatgtaggtagattataatttatatgatgaaaaaactttttcttcttaaggcaaagtcaatatgagtaagagagatattgaaatattagaatttaaagatgctaaaagagcagctagaacattatatagagcatttgataatgatgatgtcgctaaatatacatcacgtcatttagagaatgatccagttaaaaggaaagaagttgatttacaattatatgaagcatatattgtatcacatataatgaaaggtatagtatttggtattaaaggtgataattttgaagagaatgattgttatgaaactgtttcactttgggttaaacctgattctggtgcattagatgattatattacattaattagatcaggatttgctaaattagcatggaatacaggtagtgaaggtcgtagaagagttttcaaagttttatttaatgttttacatgataattatcatgaaattatgaaaattgatccaaatgaggaaaatacttggactttagtttatcttggttcaatacctgaaagtagaggtaagggtaatgttagaaaaatgtttgattatgttttcaatcattatattgatccaatgaatgctaatacttatttagagagttcagctgttcgtaatttaccaatttatgaaaaatttggatttagagcagttagtgatatttggttaggtgataaagaagatcctgttgataaggcaagaatggatattatgattagaggacctaatggtagtgaatggaaatatttaaaggaaactagagaaaaatttgggtatataatacctgaagtttcagttgctaaataaattaatagtgtttttatagttataaaaaatttattatgtaatcaatgcgaaatgaagttttaaacttaggcacttttttaggttttaattctgaactgttgagtttgctatacagtttatttcttactgacaagaacaatgaataacgaaatacatagtataccatctagtttcaatagtgctagtggtggagctagtagtaatataatgactaatcccaatatcaataccaataccaataccaataccaatacaaattataattatgaatcatcaattaatgataaaatggtatttacatggataactgaatttacatatggtccaaataaggaacaagcattattagaattaggtaaaaagagagaaatgtatgatgatttagcattagttttatggaattcatttggtgtaatgtcaagtttattagctgaaattgttagtgtttatccaatgttatcaccaccaacattaacaattcaaagttctaatagagtttgtaacgcattagcattaatgcaatgtattgcatcacataatgatacaaaaaatttattccttgaagctcaaataccattatttttatatccatttttaaatacaacttcaaaacagagaccatttgaatatttaagattaacaagtttaggtgttattggtgcattagttaaaaatgattcaccaaatgttatacaatttttattaacaactgaaattataccattatgtttaaaaataatggaaaattcatcagaattaaataaaactgttgcaattttcattttacaaaaaatcttattagatgatcaaggattacaatatgtttgtcaaacttttgatagatttgatgcagtttcaaaagttttaaatacaatggttaaacaattaattgaacaaccaacaactagattattaagacatttaattagatgttatttacgtatgtgtgataatgttgaagcaagaaatacattgaaaaattccttaccattggaattacagaataacactttcaaagaactgttaatggaagatgaaggtgctcgtgaatccttacaaatgcttcttaatgtccttaaatagtgtatagtgtaatgtaacgtattacgtaataaataaatatatgagaaaaccaccaaattttaaaattggccaccgcattaatatttccttaagtgctcagcgatttcatctcttagagggaatataaacattgatttaatattcatactcctttgattgtttctgaatcaatcactatccattcttcattgcaacaatgtctactcattcatacaagaagaatgatgatgcagattcatctgtattaccagataaaatgtctgtttatcaagaatgtctacaagcctgtaatgcatcaccaattcaaccaaagaaatgtcgtaaattattatccaaattattaagattattctattctggtgaaactttcccaaaaactgaaagtacaagtttatttttttcaatttctaaacttttccataataatgatccatcattaagacaaattgcttatttagcaattaaagaattatgttcagtatctgatgatattttaatgattacagcttcaattatgaaagatattcaaaatggtgataatgtttataaaccaaatgctgttagaacattatcaagagttttagatggttcaactattaattccgctgaaagattatataaaaattgtattgttgattcaaatcaatcaatttcttcatctgcattagtttcaagttatcatttattaccaatttcaaaggatattgttaaaagatggattaatgaaattcaagaatcaattgttgctaataaattatttcaaacttcatcttatacaactcatgaaactaataattacaatagaattccaaattcaacctatatttatcaatatcatgcattaagtttattatatcaatttaaaagtaatgataaaatgtcattaataaaaatgattcaacaattaaatgaaagaaaaactttaaataattcattagcacaaattcaaatgattagatttattgaaaaattaattattgatgattcaaaaattttagttaataatcaattatggccattatttattaattggcttaataataaatcagatatggttgaattagaggcatgtaaattaattttatttaatgcaaataaatttaattcagaacaacaattacatgcgattacaactttacaatcattattatcagttccaagaactgttactagattttcagctgttagaattttaaataaatttgcaattaaagattctgataaagtttcagtttgtaatttagaattagagagattaattaatgattcaaatagatcaatttcaacttatgccattacaactttattgaaaactggtaatattgaaactgttgatagattaattaaatcaatttcatcatttatggatgaaatttcagatgaatttaaaatcattgtaattgatgcaattagaactttatcattaaaattcccattaaaatataaatcaatgttaaaatttttaaataatattttaagggatgaaggtggttttaatttcaaaaattcaattgttgaagcaatttttgatataatcaaatttatacctgaatcaaaaccaattgcattagaaatgttatgtgaatttattgaagattgtgaatttactgaattaagtgttagaattttacatttattaggtaatgaaggtccaaaaagtgaaaatccttcaacttatgttagatatatttataatagagttgttttagaaaattcaattgttagatcaagtgcaattattgcattatctaaatttgcattaattaatgatgaaaatttaactaaaagtattaaaattttattagagagatcattaaaggatatcgatgatgaagttagagatagaacaattttatcattaaagttattaaataataatgataatttaaaggacgcaaagaattatttattaccaaattataaatattcattaccaatattagagaaagaattaagtaaatatgttaataataatgataaatcatcatttaaagaatcttttaatattaatttaattccaaaaatttctgatgaagaatataaagcatttgaattaaaggaaaaattatcaggtaaattaaatgaaattgagaaagaatctgaaattaataatgatgaaaataagagagatgataagaataataatggtaaagattctaataatagtaataatagtaataatagtgatgatgaattaattgtttcagatattactaaatatacattattacaacaacaatatcaaagtgaattatctcaattaccagaaattaatgaatatggtacattattacattcatcaaataaatttgaattaactgaaaaggaaacctgaatttgttgtttatgcaattaaacatattttctccaaacatattgttattgaatataatattgaaaatacattagatgaaattattttagaaaatgttaatattaatatggaaattgataatgaagaatatattgaacaattttcattaccgattgaaagattagaaccaaatagtaaaggtaagatttatttaagtatttcaagacctgaaaatgataatgaagaagataattatataatggctaatattgttaattcattatcatacattagtaaagatttagatagtgaagaaggagatgaaggatttgctgatgaatatcaaattgaagatttattaattacaccaggagattttattataccaacatttacaaatgattttactaaagaatgggatgaattaagtattgaaaatagttcagttttcaatttaggtaatgaaaattcagttaatttacaagaaacaattaataagttaataaagaatttttcaatgatgccaattgaaaatagtgaaataatttcaagtgggaaaaataatcatacattaaaattatttggtaaaagtattttaaataagaaaattgcatgtactgttaaatttgctgtaagttcaaagagtgttatgatgaaattaattgttagaggtgaagaggaagtacttgttgaagaacgttcaaatactattgaataaatagagtaatatgtgtaattaaataaagcaaaaataaaaacaatctataatttaataattttatttattataacaatttatttaacatttaattatttaacattgattatattatatatacaagggaaggaattacgtctattgattcatgataatatttaaatttcaaaaccgaaacctttcatacaagttttataagcagcaattaatggttcacattttggtgaatcaactaccattcattaataaacattcatctcttgcagatttttcagttttacaaacacaacatggttttggtttagctgtttgaaaaaatgttagtataatgcttttcctttatcacaactcattctaatacatacattcttgtttcttttcttcagacattgtggatagttaacgaaagagaagaagaagaagagatgtgtagaacaaaaagagtaaaaagaagaagcatgccacagtggagtcagttattagtaatttgcatgattaatatagtgggtggcgcagtgtttttttgtaattaatatgtggcgcatgaatcgttattattatagagtatagacccttttattattattattattacacttcccattgaataacttctatctttattaattaatcttatacaacgatgccatcagatagggaagaatgtgaattattaggaccagttgcattaacctgtacagggtgtattaggattattatcaatgtcatcattattatacaagagaatgaatgagggacctgttaaacgaccttttaaaatttgggttttcgatgtaagtaaacaagttattggtgcttcgtttatacatattcttaatttggtgctaagtataataagtaagattaaattgataagttcattaagtattaagaaaccaaaatggagtgatgataatccatgtgattattatttccttaatatattatttgatacaactattggtataccaatactttattttttcattactttaataactaaaatattgataaggtttaatgttagaggtgttaaatcaggtgaatatgatacaccaccaaaattagttaattatttcaaacaattaataatctatttatgttcattaggattgatgaaagttagtatttattatattacaatgtgtttccccatacttgttaaaactgcaatttggttactctcaatatttgataaatatccaaatactcaaataacttttgtgttattaatattcccccttacaatgaatgcattccaatactacgtggtggataatctcattcagagtcatagttattacaaagtgaataaactcatacatgaagaagaggaaggttatggtagtgtatagtgtatagttagagctgagccgaggaagcacgtgcagcggacttttgagaatgcaaaggggggaaaaaatgtataaaagaggacggcgatcccattttatttattgttgtgtaatattgtttagtgagcttttctattgggtagatactacgcacggagcattatcggagtaaattatgagaggcacagtgtttagattaaacttatcatcattattagctatattaacagtgttattcttatcatattgtaatgcatttgaacaagatgttttagaagttactgataagaaaattggtaaaattagtaatagtaataagaaaaatattattatgatggttacagatggaactggaccttcaagtattaatatggctagatcatataatcaatttattaatgatttaccatttaatgaaactctggttttagataaatatcttattggacaatcacgcacaagatcatcatcaagtttaataactgattcagctgctggtgcaactgcattttcatgtggtttaaaatcttataatggtgcaattggagttgattcaaataaagatccttgtggtacaattttagaagcattaaaattaaaaggttataaaactggtttagttgttacaacaagtttagcagatgcaacacctgcagcatttagtgcacatgctgaatttcgtaatatgctggatttaattgcaaatcaacaattaggttataataatacattaagtaaatttgatggtgattcatttgttgatttaatgattggtggtggtagatgttcatttttaccaaaatcagatactgaaaatagttgtagacatgatgaagttaatttaattgaacttgcacaatcaaatggttggactgtttcaactgatagagaaggttttgatttattagaattaggtaataatgaaaatattaaattaccaattttatcattattatcatattataatatgccatatgaaattgatagaaatgaaaagaaatttccaagtttattagaagaaacaaagactgcattaaatattttatcaagagagactgaagattctgatgaagggtttttcttattaattgaaggttcaagaattgatcatgcaggtcatcataatgatccacatgcacaagttagagaagttttagcatatgatttagcatttgaggaagttattaaatttgcacaaaatagtgatgttgaaacatttataattagtacaagtgatcatgaaactggtggtgcagatattggtagacaaattaatgatgattaccctgattatgtttggtatcctgaagtattagcaaatgctaaaaaatcaggcgaatatttaaattttaaaattagtaaatttttccaagatcataattctagaaaaggtatgaaattatcagatctggaaaaatttattaaagatgaaattattgaaaaagatttaggtattttagattatgaaagaaatgaaattgatacaattttgtcattattaaagaaagaggaaaagaaagatgaaataaatgaaataaatgaaatgactgaaattgaatcatcatctgataatgatgaaattgaaattatcattgaagaagttgatgcagctagtggcgttgttgaatttttaaaagatatggtatcacgtagagcacgtattggatggtcaacacatggacatacagcagcagatgttaatatttacggttacagtaatactgatagaggtatgaaggaattaagggatgcattaggtggtaatgttgagaacactgatattggtaagtttatggaaagtatcaccggagttgatttagacagtataactgaaaaattgaagatataaggataggaaaatagaatagaatagacgcgacgacggcattacgtaaacaaccatcacaaatgaaaaaaaaaaatagagaattacccgattgggccagcatgtttacgtcttacccttttcagcagggagatggcctaattgggcagagcgaagtatcccgagtggggacagtatctgttgcgtgaggactttctgctggtttatataacttttgtgtcttgtctgttttggaaattaattaaattatttaaattaactctgtcttcttcctttccaatttgtatttaattattctattttatttcatttattttaattctattttaaaaaaacaagtaaaaaaacacttatatcaaacaatacaaaaatgctttcttacggtgatatctctcttagaattgttaatttcatgtttttaacagttggtcttggtttaacagcttcattagctgcaactaaaattactcataataatccacaagttaattattgtgtcttcgtttgtgcttggggtatcctttcatcatcattttatggaattgttgcattctttgttcaattccttgcatctccaattttcttagcaattttcgatttcatgaattttgttttcacatttgctggtgcaactgctttagctgttgcaattagatgtcatccatgtactaatcaaaaatatttagatgataataaagttactcaaggttcaaaggatagatgtagaaaagctcaagcttcagttgctttcctttacttttctgttttcatcttccttttctcattaattatgcaagttttaaatattgcaaagaatggtttctttgcaaattcaactccaaaaactccaagaactggtgttccaactatggctcaagtttaaaatttttgaaattaattttattttcatttaagttattaaagttcaaaattatttaaaataaaagaataaaaataatttttttgtcacatatactattcatttcaacttatttttattacatcaattttaatttaatacttaaaaagatttaatttaattcaaattttaacaaattatccttgattcccctctatcactactattaattcaaatttacaaaaaaaaaacacaaacaaataaacaaacaaatttttattttcattcatcaattaattgttattattactattatattacaacctttttactctatttttctccgtttttgttattgttattattttattttattttacaaattttatttttatcaaataactctttaatttaacttttttcttaattttatctaccttttttataattcatttatttaaagttatttaaaattgtataattataattatatctactaaattttcatacctttgttggtgatttattacagataattgttattactaatacaatgttttatttgtgttttatacaatcctaatatttttggtaacgggaccggcagaaacaatagaaaattcagaaagaaaaaaaagtttaatccgcttacataatcatttatcatttataacctcttgataacataaacctttcaactgattcccataaatgttcagaaatttgtctatccttaaacctttgatttctatctaaacttataatttcaacattccaatttttaatgttattaggaattaaatctaccattataattaatataaaatcctttaactttttgaaataatttatttggattattaattttatatggtttaaattgccattcttgacctgttgtgaaaactgcaacaactctatcccaatattctggtttaatgaaaaatttctcaacattattaacaataacaaacttaatcttcttattgaatcttttactatcccttataatattaattatatcaatattattattattaccatgatcttcattaattttatttgaatcaataaatttaccatcttgtaaaaatgatttaacattattcatcgttatcattgatattgctgatggtgataatataataattggatctttcttatgtaatatagttgataatgatgcatcatgactaatttcttccttctttgaattactactaccactaccactactaccagattttttattaccatcttgactcttcaatactctaataattttaaactcactctctcttactaaattagaaaaatcattattcttttgactaccacgtaatgttttattatgatcaattaattcaacttcatgtttattaatctcttttaataattcatcattctcaattttttgcttttttaatctccttataatcaatcatttcatctttttctaaacttttcttcttaagatttttttcatcagcttttctcactttacgactactactatccttacctccttcaactttatcatcttcccttaacatattcacaagtttcaatatccccattgatatatgaaattaaatcagttctctctaagaaagtaataacaggtatctttgcttcctcacatttagcaatataatcagtaactgttgcatccttatggatccaacagaaataaacagtaccaatattataactcttacttgcttcaacaccactttgttcactcaatgaatatttatcctcatttccatcgtttttaccctttataataacattttcagaagctaccaatactactaccatctaattcaacactatatccattcttaactgctaatctaagcgcagaaacaaacttcatcactctttgccaaagagaaacatctatgctgcagatcgattcactctgtgtgcacatgttcatgttgaaagatcaaaataagaaattttggagagaacccagtcgcgtcggttgattatgtcatcttttttttaaaaaagggccatttattatcgtgatgagcccgataagaaggttttgacagtattttattatcacaacagtctttctttcaatttgataaagcaatcatgtctggtacacgacacagttttttttcaagggttttgggaggagatagtaagaaagaaaacaatggaccgttcaataatacatcaaataatgaagaaacaacttattcaaacacttattcttatatgaatgataatataatgaaggaaatgttattatcagaaatatcattgaataataatcaattcgaacctcaagtgatagttgaggaggaaagtgttgggaatattaattttaattccgaacatgaagatgaagatactgatgaaagtgacgatgatagcggtgatggtgagagagtagtaataatagtaatgacggagttccatgatttagaggcaaataggttatctaaaaccgataagaatagaatacgaaaacaattagaagaggaattggaattaggtaactgaatatgatgatcaatatggttatgaaagtgatgtagagataggtatgctacaatcagtttatcaacaagttgagaaagttaaacaaaatattggtccaatgactcaaaaagttcaagaaactgttaataattcaatattacaacctcatatacctacttttataagtaataaaaagcaaacaattgaagaaaatagaagacaatttatgaataccaaaaaattacctgcaaaggaaagagcactgtggatgtgggctaatatagttaatttagatatattcctcaatgatgtctatgattattatatcaataatggatggaattgtattgtcttatcaatgatttgtgattcattgattgttatatttgttatctttttaacatcatttatggggaattgtattgattataataccttatttaatgagaatgtcaataaattatcacaagtttatgatggtcaatgttatgctaaaatatcatcaactcagaaagctttttatgtcgtattaggtagttttattactgttgaaaattaaaaattcaattaataatttaagagatttgaatgaaattaaattattttataactatttattgaattattgatgattcagaattacaaactattagttggccttcaattgttcaaaaaaataatgattttgaaaaatcaaaataccaatgcctttattaatgataatggctaatgatttgaaatcaaaggaaaaattaaatgctcatgatattgcaaatagattaatgagaaggataattatatgattgcaatgtttaataagaatatcttgaataagagtttaacaatacccttttctgagctctcatttcttaacaaagacattggaatggaatttgaaattttgtatatttgattatttattcaatgatcaaggtcaaataaaggcaaaagttttgagtcaacatcaacgattaacattgattatggagttgcggaaaagatttagaatagcaggtttgttgagtttgatagtcactccattcttagtgatttatttcattctctactattttcttaaattattttatgatttcaaaacaaatccgggattattaaatgcaagaagttattcaccattagctcgatggaaaatgagagaatataatgaattaccacatctatttgaagaaagattgaatctgtcaattgaatatgctgatgattatttaaatcaatttcctaaagagttaccaaacatattattgaaatttgtatcatttattacagggtcaattgttacaatattagttattctgacaattattgatagtgaaaatttccttaactttgaattaactgaaggtagaacagttttgttctatatttcaacattaggtgctgttttcacaatttgtaaaaattcaatatcaaacaataataataaatatctgtttaatcctgaaacttcacttaaaaatgtttcaaattatacacattatttaccaaactcttgggaaaatagatatcatacagttgaagtcaaaaatcaattctgtgatttatataacttaaaattaactttgatatttaaagagttgttgagtttgatcctattaccatatgttctttacatttcattaccaaactcttctgataaaataattgatttttttagagattatacaattcatgttgatggtattggatatgtgtgcacttttgcaatgttcaatatggagaaaaacaaagatcatgtagttccaaataattcaaatactacaaatgataaaatggttcaatcatacatgcattttgtcaaaagttatggaactaccggagtaaagggaaccaatacaactaatggagctttacatagtgattcacataaaataaataatataaagtttagaaatccaacacaaaatattattcaaagaaatataccaaataataaaagtaattcattacttaaatctacattattgaacaataggaaacgtaatattaatggaaatggtggcatttctaaaatgaacaacagtgatgataatgaagaagtagatgataatggaattcatgaacaaatggaagaaactaatgccgggttatcccatgcaatgaattatatcgatgatttaagtaatagtatgatgttaggtgaaagttatcaaatgggatatatgaaacctacagataatccaactacgaatgatatcgaagatgaaactaataataagagtagcggtggagttttaggattattgaaccaagtttataaacataaataaataaaatattcttaatataacatgattattttctattcttacgagctttcttctctctttcatattcattcttagctgtaccttcttcagtttgaatagagttatagattttagccattttactatgatattcatcatattctttcttctttctttcgatttgtgctcttgcttcaaacttagtatctcttctaatttccttaagtgcttgtttacgttcttccttaacttcatgtttcaatttattaatttcatctctaatagcaattggatccattggatccatatcaattgatctacttgatttactatcaggattaaatctatcactaaatcttggtgcaacttgtgcaataccaattgcacgatgtgtttgtaattttaatggacgacgttcttgattagaaattttgtaaatatttgctaatttattacctgtattgataattatactatttgtttctgaatgtttaattaaatgacgtataatcggaataaatgataatgttaattcaggtgctgcagttgtatttttgatcattttagtaataagtgtatctaatgtttgaactgatttaattattaaatgattaagaaattgtcttgtttcattttcctttgttgattttgataattcccacattttaggaaatcgataatttaacttcttcagtacttaattttagtttatcttcctttggagtgaaaatagtggattttggtttgtttgaacatattaaaatttgttcccaattttcgatttcttcaggttctggaataatcgatattaatacacgttgtaagaatgatataacttcaggtacaactctttcagatattctttcataacgaattattaaatcacataggaaaataccaaagaaaatatctgttttacttttgttcaggtttcataaactctaatgattcagctgcaactaataatgctggaatgacaactaaatggaatttatcagatgttgaaaatgtacgtccaattaatgtaagcaaaattgcatcactcttttttgggaattgttcactatcttgtgataataatctttcatgagcatttttaagatgttctctgaatgaatcgagtaatagactttcatatttttcagtaagattagatatcgtacgtgttaagaaatccattattctaacatatttttcattttcgaaaccttctggtaaatttgataattcaagtaaatattcaaataatacctgagtgaaaacacctaatttttccttattaccttcagcaagttttggttgatatgtttcaaaaattttcttaataacagtaacggtttcctcaaaattgttttcatctatgtgtgatttaaattcctttaatgtttttggacaagttaacttggcctttacagttttaggtttaacaactattttcttattaccaatagtaatgacagtttcaccagaagtagattttggtcttgatgatttaacatcatttccattatctgattcatcagcaggttcaagttcttcatcacttgaattatctggagacccaacagaaaatccattttcttcatctccactaccattccaaaaatcatcacctaaatcatcaccaactgcaccttctgctctaatttcttcatcttcaatatcaccttccattctttcttgtctcttcttttcattttcaagtaatctttcagcttcttccttttctatttcttcagctgtcttggttctatcagttggttttgctcttctatcaagttttgcttcagtgaccttcatttcataatcaatatcgaattttgacttttcaacattatcagcttgtttacctctattgaacttcacttatttcatccataacattttcaaactcctcatctaattcaccaactttttcttgattttctagatgtgtctgttgtctttctttcttatatcttttagatttagcaataacttctttcataacttctgcttttgtcttttttcttaatggttgaccattttcatcaactgcagcagattcatcgtcagcgccagcagatcttttcttagaaaaaaaatcatcatcatcaatagtatctctagatggaccattaccggataatgattgacctaaatgtgttaatccaccaaaatcaccatcatcttggaaatcaatattatcatcatcatctaaattatacattgaactcttacttgctttggctaatctttccttagtaaatctttccaacattttctcttcagcagataattgaagattaccttcaccgaatcttctatcgataataccaccagctttaccttttctttgcattctactttcatattctttccttctattttcttcaccaatttgtttattgatacctggtttaccaacagtcaatttcttttccattgcatcagctcttttgtttctagtaactttaacatcaaatggattgaatttttctctgatttctgataatgctctttctttatcatctttacgaagtttatcctgtgcaccttttcttgccttacctttggattttttaccaaaagagttagcagtcaatcctgcattttgaagagactccctaagtttcttaagttgtgcacctcctgccattattcaattgtttgtttgatgattttataccaagttcttacagtgaaaagaaaaaaatattgaataaaataaaattttttttgatgcagtgaaaaatgcgatttttttcaaagtggcacagccttaagtattcgaactgaagtctttaatgatattaatggattctcttgtggagagtaatattatacaccgtgggaaattttgtaacttttttacatagtaaaattttcaaaacccgcattttggtgcggctgtaaccattataattcaaatttgttcgattttggggctaaaaatcgtatgtttccctttgtatttcgacaatgtgtaagttttgaagggtctcaccggtatatttgggctccctgaaactaggagattctaaccaatcatctaactccaaattttgaattttattacgtaatcttgatgctttattacgtaatatccagagtgctgtgagtgagttgtcaatgttattacgtaatgaacaccaaattttgcggcgttaagtcaagttttttggagattgtaaagattatgtaagcaaaaacatgttttacgcgtgttaattaaaagtaatactgcattttggcgtattaattataaatttgtaaagaatgcaaagttatctggcttgtttatttcacgtttttcttgaactactaaaatattatagttgagtcatagcaactctaatgagttacacagacgatacacttctatttctctcttttttgagggaaaaagtaccatcaatactggaaacagacataacatctgtatcttctttcactattaaaaacgtgcaaaatattctttacaaaattatcaaatcttatcaggaacacaaaagggaacctttgagtgaaaaaaggttaaagcgttttgcagcaggtacaactttgaattttaattattactataacgagagatcagggcaagagaagtctagtgatgttcaatttaatgccgatattgataattttattcaaaataatatcaatgatgatattgagactcttgagaataaatatgggtctagaaaagttaataaaagaaaagcaaagtacatttttaaaaaattcaaaaatgcaaaactaaccaatagaggttctttactgggactcttaaatctatacggtttgaatcttgggtttttaaccacacttaaagctgctgcaagaagaagacttaaatttgatgatttggaaaaaattaaagaatcatcatttaatttcatgaagttaaatacgaagagagatcaagatattgcagatacattgaatgacatttttaaccgtttttttaatgaaaaaggctgggattacaatggtataatagattcaccatttattgaaataaacaattgtgacagatacgaatctgattacgttttaactaatgatgattttgagggtgctacctctgaaaatacttcatctgaaatgtcggtagataatctttcaatttccaataatattgatgatgataatgttctttctgatgcttatgaatctcctcctgtaggtgaattctctattaccaacgatgctaatgctagtaatattcattctgatgctcctgttttaatgtccgtagatgaattaccaatttttgatgcttatattgataatcaaattgatactcaggttaataatgtgttaccttcaaatgggtttaactccggaaattcaagttcttctgaagatagtggtaacgaaggtgataatgatgatgatgatgataataataatggtttttttagtgatgcttcagatttaatgcctgataatatgggtggttctaatgaatctgattattttggaaacagtagtgacgatgaggggggacctaatcaagatgttccaacagaaaatgatccaaatattatagaacaggagccagtagatgagaattcttgggaatatcaaaaaccacatttcaatgcagaacaatttgatgcgttcatggcaaataatttcaagagaatctttcatactgattgtgcttttcttgtttattggatgtcttctcatcactacatttctatgaataaagctaacattattttgagattcatgcattcttttggtttaattcaccctaaagatttagaaataagacgtctcaatgaaagagttttgaaagaatggagcaaagtaggtacatgtaaggatattgaattttgtcactgttcactgtgtctctatttttttgaaaataaagaccttcaagagcatactcttgggaacgaagttcataaaagatgtgatgcagaatcatttagatatcagtcaatcgttcctgttctttattcgctttaccaaaataaagatatcagaaaacatatggaagatgagagagagaaatattctaggaatactaatgcaattggtactgtttatcaatctgataaaatgcgtaggttttttgaagtaagcagtaacaatccaaatgagtttacttttaacatccatgtttcgagtgatgattgtaatattcaagtgaagacttataaaggaatcaaagttttttgtgtcatgtttatggatttgccagaaatgttaagatataaaaataattttattcatatgccagaagttttattaacaaaaagtgattcacctggatatactggtattacttgcaaggctctctccgaagaattaaatcttctttcagaaaaaggttttagttttattgaaaatggtcaggaaattactataaaaataaatttattatcgatgtctgctgatatgaaggcattgaataatgtattggaaacattacctcctagatcaaatcatccatgttctttttgcacaattcataaatcagaaaaacaaatttttcttacacctttgactaaagaaatgcgtcgtaacagacttgaagaagaaggtagtaataatggtaatgatggtaatactaacaatgaaaataacgatgttacatacactttttttgacgaaattgaagaaatagatgtggatgatgctgaaaatgtctttaaagatataaaagttacaactgaaatgtataaatcatgtttggaagaaactttggctggaaatgttacaacagattggagagtaaaggcaaaatctttagtttcacaacttaatcttgatgattatttcaaaattgtttgtccagatttgatgcatactatttatgagaattacattactaaaagagtggtgagcatttttgtttcaatggtttttaaacgtctggatatagcatcacataatttaattcttcaacataaaaaaaacctagatgaatatttggtaaaagttcatctatttgaagagattagggatatacccctttgtttagattcacttatgaccaagagtagagttaaagcgattgatgttaaagcttttacacatatttttccgttatatttcttaccgattgctgaagacattaaaaatgtgaatccgttaactccttatcaatttttggttaaatgtatgattgaaatgaatgcatatgctgttgctttgattgccactgatgttccaattgaatttgttgataataataataggaatgagatgagaagaagttttttgaaattgactttgaaattagaaagattatttcaaattcctgaatataaaccgatcttcgaaaaatattttcatgtaccttctcatcaaatccttcatttattcgacttgtggaaagagtttgggtcttttagggataattggtgttttcatacagaaagatgttgttgcacaattaggagaagggtgagccctcataaaaatagttataaaactacacaaaatcagttgacttttttaaccattgacatttgcaaaaacataactgaatataagtatgaccatatgagttgttattcgacatcaaaaacagcaaaagctcaacccgatgctgacatggaaggtgctctttcaagattgtatgctcaaggtgaaataacagaaggagaaagtttgataatcagagaacaaaaacatatccattcccgtaatactcatattagtaataaaggtgtaactggttatgcaaaattcagggtggataacaattggcaatatgtaaaagttgaaaggcttgttaaagttgaacttcatgatcgttataagttacttatgaagttcaaaaaagtgaatattgaacatgattggatgaaaacttattctgggaatttagaatttgcattatattctagaatgagagattccgatcttgattttgaatggatggagctgaacaatagtgttgaactgtttggtattcatgtttttgaagagtatgacaatattattgctgataaacatccagatttcagaaacgttttcagatttgctgccgagtaataatgtaatgtgttgaatatgttgtgtaattaatgatctttgtaatttaaatagtcgttaaattatatactttgcaggccttactattgaacatgcaagttaataaagttgtccaacagtgtgtgtcaacgttaaataatctgtcaagtttttaattcttacgtaacatttatttttacaattcaagcatgttgttgtttttaataatttattctataactctttactatttctaaccttttcttttcaaagacagaaatggagcaaccgtaagtacatctattgtttgttgaattagaaaccaccaatactaacatcgaattaagattatggataccatctcattcttcataccactttatcttttctaacaacaagattttcacaggaaagttgctgaatagtgtattcaaacgtataagtaattctaaattttattatatgctatgtatgacagtatcattattgctcaaatatgaatttttccctactattaagagaaaaagaaaagtttacagagagttactgagatcaggtagatgctattgcttaccaaaaatacttgtcaaattagtaattcaaacgattttagatgaatacaaagaattcacaacaattgatattgaagatatacacaacgttgaccctagtatgtatttagattccgaagatgttacacaagatgatggcaatttagaaaatacaactgaaacgaatcaaatttcaaccctttttaattgggctgattcgagtttggaaggactacagatacatgataataatagcagaaacacttcaatatttttgcgtaacttagcttcagaaattaattcgttatgatgctttaaaatcaaactatggttaaacacctcaaacacaattttaaagttagataaaatactttctttttatgataagcggttgtaattcaattaaaaaattgtataatattgttactatagtaagaaaaaaaaaagttataagtaattactgttaataaaattcgatataaagaatactgtaaattagtaaagataaattgaaaaaataatagattaatttaaatcgaaaaaaggttattaaaactgaaataatcatacagtcaaataggccaaattgtaattactaaactcttttaggaaattttcctttttaagaaagggtaaaccctcataatcacgtgatctttgaaaaaacctcaaacccttttgtgttttgacgcaaacaaatattattttcagccaatcggattcaaaattgacaagcttccggcgcttaaatttttttggatgttaaaaaaccgatttgttataaatatctgttcaattcccctaatttttttacaaaagcagaaattttgactctatccctttcttttccctttgttttagattgttaaattatttacaaatactgtaatctcttatctttcatttcaatttcttatcttttattgtatttttctttatctttcatttcaatttcttatcttttattgtatttttctttatctttcatttcaatttcttatcttttattgtatttttctttatctttcatttcaatttcttatcttctattgtaattctttatgtaattctttatcttctattgtaattctttatcttctattgtaattctttatttttaattatttaatttcttattttttatttttttctttatttccgattttcttattctttatttttttctttatttccgaattttttatttttttatttttttctttatctccgaattatttatttttttattttttttatctccgaatttttttatctttcgcgtcgtttttaaatccgcaatttttttggaatttatggcgcattaaaaattttgtaaatgcggcgcatgaaaaaactcattctcgaaatttgaaaatcactttttttttgtttacttttcaaaaaattaaagtgagtttctttactaaaattacatagcgcatttgttcatgaaaaaaggcaatttttgcttacgtaaaactaaaaaatagagaatcttattttttttaaaaaaatttcccacggtgtatatatcgatacagagtaaatgtcatctgctcgaagagtcgtggtaacagggttgggagtggtgtctcctttgggtataggtgcaaaacacgcatggaaacaattgataagtgggaaatccggtcttgtttctacatcttctctgaaaaatgctgatcaatttaaagatataccatccaaggtggttggtaaagttccaattacagaagaaggagaagatacagttccaggaagttttaaaccatctgaccatttcacttcacatgaactacgtcgtttttcaccatttattcaatatgcattagttgcggccgaggaagcattgaaagattcaggtttaaatacagctaatatgtctattgaagaacaatacagaacaggagtttgtattggttcaggtattggatctattgatgatagttatagtaattcagttgcactctcacagggtggatataggaaactgcaaccattatttgttccaaaactgttaactaatatggcaagtggtaatgtttccattaaatatggatttaaaggtgttaatcattcagtaagtactgcatgcgccacaggtgtacattcaatcggtgattcgtttagatttatacgtgatgattatgcagatgttatagtttgtggtgcatctgaggcagcagttcacccattagcattaggtggatttgctcgtgcaaaaagtgttacaactaaatttgaaaatgaaccatggaaagcatcaagacctttcgataaggatagatcaggatttgtactcggtgaaggatgtggtattttaattttagaagaattagaacatgcattagctagaaatgctaaaatttatgcagagattaaaggatatggattatcaggtgattcaaatcatataactacaccaagtaaagatggtgatggtgcaaaacgtgcaatggaaatggcattgaaaaatggtaatgtcaaacctgaaaatattaattatattaatgcacatgcaacatcaactccactaggtgatagagcagaaaattatgcaattaaacgtatatttggtgatttgaaggattcaaatttgagagttagttcaaataaaggtcaaatgggtcatttactaggtgcagcaggtgcagttgaaagtattttcactattctggcaattaataataatattgcaccaccaacaatgaattgtgataatcccggtatgcatgctgaagataatactgaagaggattttattttcgattatgtttctaatcaatcacaaaaaattgaaattaatcatgcactttcaaatagttttggatttggtggtacaaatgcatctttatgtatttctaaatttgttaaataaataatgatttgtaatgacgtcttgtgaataatagttttaatatatgaatggaaaaatacgtttttgaaacttaatttcatcctgtgatttatggaaatgaaatgattcatttgcagaaattgataagttaacagctacccagactacaaccaatgaaaacgatattgatggtttgataaggaagatggaaccatatattattatttcatcaagataatgtggacatacaacatattgaaacaatccaattcttggtatggtatattttttttgctttgataatattttatggttaaaagattgatccaaagacgcaattgtaaatattattataggaacaatcattccccaaacggaaacatcatttgacatatcaagcaaatacataaccaaaggaatcatattaatagtagtatagaaataaacaccaaccaagtaatggaatatatgaatatttgaagtctttgaaaacttggaaacaaagagacattcaaacaatcttcttgaactttgaatcaaatttatgatgctaatgacttgtaaatccgtaaaagcaaatcgatgtcccagtatcaaacaaacattgactaaagataatgtaaaatgaatgatataaaagtgagtaaaccagcatttaggaacgtaaacgtttaaaaatggtagtttatcgtgtttcagctttagtgttttaccatattttaagaatgattgcagaggaggaaacaatgaagtcaataccaccgatacagatgctagaagtagagataaattaagagtcgataaagcccattgcaactgcagagtagtgaataccatcctttgtcttaagtaaattatataataatcagacttcttctcttagtggagcaactcgtccaaaacgaaatttccatttttcatgtctttcattaattaattaactattttcgatttttgtaatcactgtttctttcttttgtgactcgtattattattatattattcttgtatctataaacatctaacaatggccgtacctattgtgtttttatactatggtcttatgatcatggtatccatttttctgtacaactatgttgacgaacaattgttaatcgaaggaaaaaataaattagttgaaactatcggtgatgaaaactcattattcaaggaacaagctaccaaattaaaggaaatggtttatccatacattcaagaatacattgaaactccagtttctcacatgttaaatgaaatcaatcataaagacgtcgttccagaagtttcccattatgctattactatcaaagcactatcttatttcaaaaagtttttagctactgaaactggtaaaagaatcacttttatttacaataaattagctgcatttatctcccaaattttaactgattatccacaaatttcagagggtgctactttcttatggaacaatcttcataataatgctgaagtagtctatggtcatatctccactgcatttgtttatatcactgaaactgaaccaattaagagtttaatttctgaatatgctaagattcacgataagtatgtcactccatacatcaacgaatcaagtgaaattgtcccagatttgtttcacaaatacttagacaaggtctgtcaaattattttcaatgacaatagtaatgatactaaatacacattcttagttttagttgttggtgttttcttcttcaaatttttccttactaaattattaagaatttttgcaaaagatgcattccaaatgaacaagaatgtctctgatatgtacaaacaagttcaattagatgaattaaccaatcaaactggtcaacacagtgatgtctatttagatgttaaaaaatacagtgttagtgatttagttgttgatgaactcgatccagcgagcaatcgcacaattggagaacaatcagggagcaatcgcacaagagaagaagactcagggagcaatcgcaacaccatcatccaacaagaaatcaaaagggaagaagaacaacaacaacaaccgcaagtaattgatactcctccaagaaatatcaataaaggtgttgctaataacactttaactgcagattctattaaaataaatagttcacccactccatctaccatttctgtcaaatcgacaacttctacaaaatctacacgtctggtgtttataccaggtaaggatacgatcgagtcaattgatgaagaagctatccttaaaactgaaatattaacatcatctcctactactactatctccatgtaattttatattaataattattaacaacttacttatacacttttactcactgataagataagaatacgtcgatgacattaatgtgacaaaaaaataattttcgttttctgcctttccctttgctcttcgtacctttttatgattcttttaagagatgatcttttgttttgtatttcttctttctattttaataaactattcatctaatactaaagtctttgcaatgtctaaacaagaatactaccaacaacaacctcaacaacaatatcaacaagaatttcctcctcaacaacaatataaccaaaatcgttcctcaagaagttgtggtggggctggttctaattgtctaggtagattctgggattcaatcattttcggtgctggtgcatcaattggtaatagaatcattggagcaatctgctcttaggtgcctttaaatttaaaagctatgtcgaatttacaaaaaaaaaattatattgttaaaattaatctactgtgtctgtactacaagtgtaattttcgtattgctttttcaactttataaatgatatattaatatataataaaatagttctcaacataaatgatatcttatgtgaagaaacgaccataaactttccagattctgtcaatagtatgtaactttaattcagagtattcacgtacattgtgcaaatcattaacgtctttaatgaaatctttcaaaatatattgtggcataatttgactagccaagttcttgatattcttgatttgaataaaaatcaaaccttgattgtaaacttcaagtgtattatcaacatcatcagtgttaacatcaatttcattactctttttcttattatttttgatatcccaagatgttattattttttcaacagcacctaaacttctacataatctcaccccaatatcaaacgatttttgctttttatccttattttcattatcaccattataccaactcatgaatgaatttttcaaattccataaaatgaataaacttggtgaggcagcaacaaatccgaaaactaattcttgacttttaagtattttatcaacaccatttaatgctaatgcaccatcaacttttgtcttttgaatttgaattaaaatatttcttagcatttcacctgtaagagctgatttaattggagttttcatttcagcttcataatcattcataataattgtcaaatcaccagattttattaaattagcaaattcttcaatatctttaatatcagcatgatgaacatcttttgcataatcaattaccatcctttcaagtgattttaaatctgaagcaagtgactgttgtgacattagagcaatttcagaattattatcatgtctaatagttttcaatatattatttattggattaattatccaattattccagaatgaaatagttgtatcaataacataatcacctaatcttctgaaatattgaaatgtttcccttctaacattttcatcgtacatgaatgatctaacatttcttacagtggatggaagatatgataatgctaataaagataaaggtaaaataactggccaatttctagttaaatatgatggtggtttattttctttgattttttcagatattatcttttcaaattctgggagtacgttcttaattatattttttaattcttttctttgagctggtactgaatcatccttcgcacattcatcaggtaatttgaatgtttcagcttccttgaataatgttggaatattataaacaatataattttcagcatgaaagccattttgatttttaaaacttactggaggatttaataacaaataacctagtctggtgatgttttgcttccttatcttattcaatgctcttcttttcttttctagatcgtacttagcataacgataaggtaaattaatagttgagttccaaaaagtgtttagcattgatttggaggttcttcttttctcaagtaaaaatgaagttggtgatgcaaagaattcttcagttgctttgttcaataatgttatgccaactttgataaattgtgaaatatttaaatatgcatcaattgtaaatgagggcaaccattgtggaatatctttaactgtgagactatttttcattgtaccaacatccttcacgttaataacttttttaataaattggaatacattaacgggtaaggtttgtaaaaaatacatcataattctataatctttacttaatgtaacatcatagtaattaatagcatccattatttgaatagtagaatctgtaagacttttacttgttcttaataggacaattgatgttatatatgataaagttattgttttcaaatcatttgcatcttgagtgtgtgatgtagattccaatgtagctagtctgttcagacattgattaagttcattgaaattttcattagattttgaattatctacctgatcatccaaatctaaatcattattctccgtatacttgtattgttgtgcaatatcatacactttggcaaatatatcaattaattcatcgtgtttttctcctctggattgttcattattgtaagatactaagatattgtcaatttcctccttaacatcaacaccttcctgagccaatgagaaagtctctaatgttaataaagacatgattatagatcaatctaacccactctgtacttccagaacagtatagatataccttgttatccaatctacaagaaacaatataaattctagtaattagtcctgtactgagaaagtatattaattttttgatttatttatcacagtgtgagatccgttttttgatgattaaattgcatgcctctgctgataatgttgcttctacttttgttctttcttttgcacttcttatttgctctctctgtacaagatcactctctcatctcatagagtttatcttgtagttactaggaaaagtgacaaattacatttctttgcatttatcccccatttttaatagactattcaagaaagacattgcaaatacttatattgccgataattgggatcgagatatagaattacaatcattgcattcatcttcaagtacagaatctaatacaaatactaataataaaaataaacataaaaagatgaaattctcacattcacttcaattcaactcagttccagaatggtcatctaaatacatcaattacccatatttgaaaaaggtggcgtataatctacaaagacaatatgttaaagaattgaattctaaaaactatacaggtgaaattgaatttactgtggatcctaatgataaagaaaatccactggttgtctttagaggtgctttggataaggaagcaaataaaatcgataaattttatcaacaacaagaagaggaaattttaaaagaatatgaatcattattcaaagaatttctggaatttgaaattgattttccatttgataaagatgatagagattcaagagaaacattaagaaatatcttaaagaatttaatgccaaattatgaatcttatatgcttgaatactcacatgaccattataatgataatggtgatcaccatgatgaagaaaataatattgataatattgatggctctgtcaatcaatacaataataatttaatatcaaatatgataagctcccctgctcaaaattcagaaatggcttcactggatgatattgattctttaaaattgcaaaagaaaaaatctttcccaactctattttatgacgatgattttcatgttactttcttagaagctttgaaagcagaaaagaaaccttttgttattaaggttttcactcatctgtccgaattaaaatcatatattgagttgaatagaattggttttgcaaaggcattgaaaaagtttgataaagttttacaaactaatttaaaggatgaatacttacatgaattagatgaaaacagatatgttttccaatcttcaactttaaaaaaactgaataataatattgctaatatcattaagttatactcgatatttactcataatagtatcaatgaatctacattagaattaagtactaatttacgtgaaaaagttgtctttgagagaaacacagtttggagagatatgattggtatggaaagaaagtctcaagctgcatatgctaaaccagattcagctgctcttttaatgaagaaggaaccactgataattaaattgggtgcaacaagagaaattattataccaaactttttattttcttcatcattatggaaaattattttcattacaataatcacattaacattactcaaatggtcaccatttgaagatcttcaacaaaagaactgttttgctgtattaatttgttcttcattactatgggcatctgaagcaattccattattcacaacatcattattattaccatttttgattgtcttattgaaagttcttaaagacactgatacaaatgaaatattaaccgcaagtgatgcatctaaatttatttgttctgctatgtggtcaccaatcattttacttttattaggtggtttcaccttagcagctgcattatcaaaacataatcttgataaatatgcatgtacgtttttactttcaaaagttaaacaagaacctgcacctatattattctcaattatggttgtctcaacaattgttgcagcttttgtctctaatgttgcagcacccgttttaatgtattctgtcgtccaaccaattttaaacacgttaaatgatacaacagttaatggtaaaacagttaagaatcaatttgcacaagcattagttttaggtattgcattagcatcttcagttgcaggtatggcatcaccaattgcatcaccacaaaatgttgtcgctttacaatttatggatcctgaacctaattggttacagtggtttgcagtttctgttcctgtttgtatttgttgtttggtaatcatctttattattttattattttcattctcatttaaagatattacaattgtaccaattaatcaacattcagataattttacaattaaacaatatgttgttattctaatttcaatcacaacaattgttttatggtgtcttgcatcagttttagaaccttggtttggtgatatgggtcaaattgcattattatcaatggttacattctatgttacaggctcattatcacaagaagattttaataattatccatggacaattgttattcttgcaatgggtggtatggctttaggtaaagcagtttcagtttctggtttattagcaacaattgcaaaacttattcaagttcaacttgaagaatctgaattatttacaattttatcagttttcggattgatcgtgttaattatggcaacttttgtctctcatacagttgcagcattgattattatcccattagttgctgaaattggtaaagcattaccagatccacatccaaatattttagttttctgtactgcacttatctgttcatgtgcaatgggtttacctacatctgggttccctaatgttacagcaattggattaactaataacgttggtgaaaaatatttaaatgtcggtacattcatcaagatcggtgttcctgcgagtatcggttgtggacttgttgttattacagttggttacttatgtttaagattaattggtatgtgatttgaaggatatatatagattataatcaatacagtttttttttcagttataaagcgtttttattttgttttttcttagaattaattggttccatagtaaatattatcgataaacctatgacacatccaccaatcattatccgaatcggtgctaccatgaccaccaacacaggcagtaacaattttaatttttggaaatgcatggaaaattctctttatagctaattcagtagttgtataattaactaaaataatattattttcgtcaacattatgatctaataaaattttaattgccattattgatgctgctcccgatattgtctgtgcatcgaaaagaagtacttgtgagttcttagttattattggtaatttttcagtgtgtaattgaggttcaccagttcttgaatctgtttgaattaaaagtttaccaattttagcagctggtatagttcttcttaaggattttataaaacaatcaccggatcttatgattgaaactgcaattatttcattcaattggaaaaatgcatctgttggattaattttaacatttataggtgtttcaatggttttacctatagaatctcctgaaacatatctgacaaaatttaatgattcattaatcaaaattgatgcaattctatcaaaataaaatgagaaaatatcattcttagtttctttattaagtaatattgttttaataactttaacttgattggtttcctcaattattgtaacattatcccaattgattggattaattttcaatcccaacatttttaaatgattaatatgttcagttgatttaatctttaattgattctttaaatgttcaataagtaattctaaagctatatagttatccgatccacgtggaataactatatctgcatttgatcttgttggtaagacatataaaatagcgttaggtttaacgaatgcatcccattgttcgataacacttttgatatctctacctctatgaacaatatctcttaataacctacgagaataacaaatatcaatatcagtatcaacgaaaaccttacaatccattaaatctaacaattcctttttgaataatgtaaaaataccttcaattataataacgtttgcaccatatattgtaattgattgatcttttattcgttgatggttactaaatgaatacattggtatttctgtctttttcccatttttaattgatttaacacattcataaatgagatctaaatcaattgcatctggatgatcaaaatcatattcattattgaatgcctttgcactcaattcaggtgtaagttctttataaaaattatcaagtgatagtaaaattgtccatggttcgttaattgactttataatttcttgtgcaactgttgttttacctgatccactcaatcccgctattccaataatataaggtgatgaccatggtggtatgtattcagacatgtgaagaatggattgtttaaagatagattgaggactgtcatcaggagtcttatcgatattaaagcattgccatcatgtttcatgtagggtggctgtaaaatataaagatgcggcgcagcttacaaagaattaatacattaagcacaacttgaatgtttcttttttatccaaataagttgtaccattgatgggcgaaatccgtcaacaacctgatgattggacagagacgcagctcaaacgtgctcgtgtgaaaaaagttgatgttgatgaagaaaaggatgatgaaatgtatacttttgatggtggagatcatattgagtttggtgaagatgaaaaattagttgaaatgactgaaatcagtgaactaatagatatagctgaacaaaaagagtttaatttgattgatacgaaacaaaaattaccaatttatcaagaaagaacccgggttatggaaatgatcaaggaaaatcaagttattatcttagttggtgaaacaggttcaggtaaaactacacaattaccacaatatatagttgaagatggatatggacgagtttgttgtacacaaccacgtcgagtggcagcaatgagtgttgctgcgcgtgttgcagatgagatgggtacgaaagttggtgataaggttggttatagtgttagatttgatgaacgaagtagtaagagaacagttttaaaatattcaactgatggtatgttagttagagaaatgatgggagatttaaatttaagtaaatatggtgttataatggttgatgaagcacatgaaagaactattcatactgatattttacttggattgttaaaggaattaatatctaaacgtaaggatttgaaaattgttatatcatctgcaacattagatgctgaaaagtttagcttatttttcaacaatgcaccaattgtcactgtgaagggtcgtcgattccctgttgatatttattatactatacatcccgaggctagttatttaaaggctgcaatcgctagtgtgttacagattcatggtagtggtgctaatggtgatattttagtttttttaacaggacaggaagaaatagaattattttgtgaagcattatctgaaatcgatactcttgatgtattgccattatatgcaagtcttcaacctgatcagcaaaaattagtgtttgagaaaacaaacaaccgtaaagttgttgcatcaactaatatagctgaaacatcattaacaattgacggtattgttttcgttattgatagtggtatggttaaacaaaagaaatatgatccatcgaatgatagtgatagtttagttgttgcatcatgttctaaggcatcagcagatcaaagagctggtagagctggtagagttcaaccaggtaaatgttttagattatacactaaggaatcatacaatgagatggcagtttcaccaacacctgaaattttaagatctgaattaacaagtattgttttatcacttttatcaatgaatattacaaatattatgacattcccattcatggatcgaccatcagctaaaggtcttgcccgttcattatcactactttatgcactgggtgcactcaatagtaagggacaattaacaactattggaattcaagttatctgcattaccattaactccaatgataggaagaactattttagctgcatcctgaaaacggtgtagtcgatgaagttatcgcaattgtctctcttttcgatgaatccccatttataaatccctaagaaagatactactaataaaactgctgctaaggctgcacaacgtcaatttgctaatacttataaagctgggggtgacccattagcattactagcattatgggaaggatacaatgcaagtggatactccaatcaatggtgccatgatcattgggttgatgctagatcaatgagacgtgcaagagatgttaggaaacaattacagagaatatgtcgtactatgggtctttattatggtacgattaatggtgatgtagtccgaaatggtgaaaaatcatctcacatgaatacttaatgataagactatatcgattatgaagagtctctgtcgaggtcttttcccccataagggagtattatcagatataaccaattgcacatactctacagcagcaggaccagctacactacacccatcatcagtgctacagggtacagactgcagagaacaccccgttgaaaccaccacggacagtagtgttccaacatgtgatccgaacttcgcgaaattttatttacaacgtgatgcctgtcatggagtcctggattgatattagagagtttaaataaatataactgaatgtttgtttcttttgtagaggtttgtttctttcttgatatattgtgtattctgctttatataactaaataaaaatggttctattttatgcgcctaataaagaattatatgaacttacaaagaagttttacaaatcattatttttccaaagctatgaagaaacaaatgatcaatgtattttatcaaacaataaaacttcaatttcattattaattgatccagaaaattcagcttcaattgaagaaattaagactaatacatgaaaatttaattaaacatattaataaaagagattggagaacttatcaaagctgcaattacatttaatgttgaaaatttaaaggaaattgaatcaattttaactgctaataatgttcaatttcaacaaaaaccactgaataatccattggaagtttatgcaatcgatccattaggttcaattattggtttctctaaattagcaaacccatttgctgtaaaggaaagaaagcatcatacacattcacattcacatacagaatctcataacctttcaatcggttcatcaattgcaactgcaaataatactaatactgcaactaatgatgttcaacaatgtatcgcagtcatgacatccggtggtgatgctcccggtatgaatgctaatgtccgtgcaattattcgtactgcaattcataaaaattgtaaagcttacgtcattcatgaaggttattcaggtttagttaatggtggtgattttataaaggaaattcattggtctgatgttaatggatggttatctgatggtggtactaatatcggtactgcaagatgtatggaatttaaggaaagagaatggtagattaactgcatgtcataatatgattaatgcaggtataactgcattaattgtttgtggtggtgatggttcattaactggtgctgatttatttagagctgaatggccttctttaattcaaagaattattagacactggtaaaattactcaagatcaatttgataaacatcaatttttaaatatttgtggtacagttggctcaattgataatgatatgtcctcaactgatgttacaattggttcttattcttcacttgatagaatttgtaaagcaattgattatattgatgcaactgctaattctcatcaacgtgcctttgttattgaagttatgggtagacattgtggttggttagcattaatggctggtattgcaacaagtgctgattatattttcattcctgaatctccaagtaaacaaagtgaatggagtgaacatatgtgtaaagttatttccaaacacagagagagaggtaagagaaagacaatcgttattgttgctgaaggtgcaattgattctagtttaaatccaattagttgtaatgatgttaaggatattttagttgaaaaattaggtttagatacaagagttacaactttaggtcatgttcaacgtggtggacctgcagttgcatttgatagatatttagctacaatgcaaggtgtttatgcagttgatgcagttttaaatggtaatccagacacaccatctccaatgattggtatttctgaaaataaaattattaagagaaacttagttgatgcagttaaattaacaaaatctgttgccgaagcaattaatgcaaaagattttgataaagttatggaattaagagatactgaatttagtgaacatctgaaatattttaaagcaattaatagtgcagatttcaaagatccttcattatcaagtgaaaatcataaaaattttgcaattataaatgttggagcaccagctggtggtatgaattctgcaacttatgcatttgcaaattattgtttatcaagaggtcatacagccttatgcaatttataatggattttctggattatcaagacatgaatcaattagatcacttgactggttagaaattgaaaattggaattcattaggtggatctgaaattggtacaaatagggatactccattagagacagatattggattaatttcatattatttaagtaaatataaaattgatggtttattaattgttggtggttttgaagcattagaatcattacatcaattagaaaattctagatcaagttatccaggattaagaattccaatggttttaattcctgcaacaatttctaataatgttccaggtactgaatattcattaggttcagatacatgtttaaatcaattagttgaatattgtgatataattagtcaaagtgcaagtgcaactagaaatagatgttttgttgttgaagttcaaggtggtaattgtggttatattgcaacatatgcacaactatgtgcaggtgcagaatgttcatatgtacctgaagaaggtattgatttaaaacaattaaatttagatattcaaacattaaagattaatttccataatgataatggtagaaataaatcaggtagaattttaattaaatcagaattagcaagtaaagcattaacaactgatgttattggagatataataagttctgaatctaatggtagatttgattcaagaactgcaattccaggtcatgttcaacaaggtggtattccatcaccaattgatagaactagagcaacaagattagcaattaaaggcaattgaatttatggaatctaattttgataatatttctaaagctcaaaatgaaattggtgaatttattagatcaccagaagctgatttaacagctgcagttttaggtattcaaaagaacaatgttttatttacaccagtttctaaaatttgggatcatgaaactcataaagaaggtagaatgagaaagattatattctgggatgaagcaagggaagttgcagatatgttagttggtagagttaaggtttgatatttatttacttttctttgaatacccgtacatttataattttaataatctatataattaagtaatgaaacaaaacataaaaaaataaaaaaaataaaaaaacgaaaaagaaatgctaattattcatcaatgcatcccaatcacgttctaaaacctgtggtaatgtagtcgtaaacatttcatttaaatctgatttcaaatttgtatcatttaaggggaaatagagtatttcgtcaacttgatttattttgacaattaatttcccattaagttttaatttaagtatttcatcaataattaaatctttttcatcattacttgatatatccaagagttcaaacaaattatcaaatcttatagttttgtaaacgttagagatataaattatattcagttgaatgatatttaatttaaccgtacttagctcatcttcactaaaggatactagctttatcgcttcatttcgtattttatcataatcaaggagtgtatcatcacatagtaagttgagaagttcaaattgatgagaatcaatgaatgttttgattattgattttttgaaatatccataaggttccaaaaggaacgattttataaaaaaagcataaattttttgatcaatcagtaaatttttatgaccagtattgaataattcaaatattaaatttaagtacaatgaattattattttcaaatttcaaatactctaataataataattgtaaattgaatttcaaataattcagtactttcgcataaattgtagatttagataattcattaatttcaatatttactttgtttatccaattttcaatatttatcctctctcgaatagtactattaatgaaatgattgtttttaacattttcacatttgaacaggagtataagtaagtttatatccaatctatctttccatgatggtatctttgttatatctatattcttattaatcaatgaataatcattactggtgtatatttgaagtaatgtattcaatattttatcatctttaacaagtgaatttatttcattatagttaatgaattgcaaatatgtaatataacgattataagtgaatcattagagttttgactgtaatcgaatggttatttccttattaactttgttcgtatactctgtcgtattcatcagcggtatccattatacatatatataagtaagaaagttatatcataaaaacaagtgataaggaagtggtataaaacgtagattaatactcgtatacaacaattcgtatagctcgttccgcaatattttcatttccattttttttcaaaattcgaaatgtttagtaatatattatcaacaatactattctttttctttattttaatgtgtatttcagattgttcttatcttattcaacaaccaagtatcaaaaactaatacaagatgttatgttgtagtaagaaatgttccttaatgtcaattcctcaaagtagttggattactttatatgattttctatgtaatggatactttattttatacatggttaccaaagaattatgttttcgataaggatgaattacaaattattgttaaggaaacattagcaactacatcaaatgatgatgcatatccattctttgaagcattacaagaaaaattggaagaaaaatatggtagtgaaattattaataaagttaataaggaagattgggttttcaataatgcaggtggagcaatgggtcaaatgattattttacatgcatcaatttctgaatatttaattattttcggatcatcagttggtacagagggacattcaggtattcattttgctgatgattattttacaattttaaaaggtcaacaatgggcatcatttgcaaatcaatttgaaaaatctgtttatttaccaggtgatgttcatcatttagctaagggtaatattaaacaatattcaatgccaggtggatcatttgcattagaattagcacaaggttggattccagctatgttaccatttggatttttagatacattttcatcaacattagatttccataatttagcaaagacagtttatttaactggtaaggatatgattaaaaacttgataaatggtaagttctagtgaataagataatattatataaatgttacattaaaatagaaatacaatacttccctgcataaacaacactaattaaatttaagacccataattgtagttcaccgatcttaattcaggttccggtgattgaaattttcattttcttttttaatctgcaactgggcttattttatttattttcattcattgtcatttattgtcattttttattgtctctttttgccttttcctttctttttctgtagattatcagtgattgttattgacatatcgatatatcacatttttaccttccaatttgcttacagcttttggaaactattattcacttttcactattctagttataattctagttctacaataatgactcgacatggtggtactaagaagaggaaaaattctttagataatgatatcccacattcaactgaaatgaataaatcaatttcatattcttcaaattcaaattcttcaattttaaattcaaatttttcacagagtaacaataataaatcaatacattcttcaccatctaataaacgacataaaccttcaatacagagcaatagcagtaataacaatattcacagtcatactcatagccatcaatcaacaaattcaaaatcttcttcaataataataatagagaatgatataaatgatataaataatataaataataaacctctactatctgatgagttattcttttcaacttgggttaaatgtggtaatttagcattatcattgaattcaaattcatcttctgcaattaaatgtttccagatggcattaaattatttcccaatgaataattctataatgaatttattggttgaattattaatacaaaatgatttaattaaacaaaattacattggtattcaaaatacaattaattttatcataaaatcaattaataagtacccaaatttgaaaaatgattttgaattaaatataaaattagctgattattatttactcataaatgaacttgaaaaatctcatgaaattataattagtttaatggaaatcgatcaaaataatcctaaatgtatggctaatattaggtaaatgtttgaaaaaaatgaatttacaaagagattcaattaatgcttttacaaattcattatatttattaccaaaagatttaaataatttaaattttattaaaattgcaagaaatattcatttagaattagttcaattagcaattgatgatggagatttagaatctgctagaaatgaattaggttcagttttatcattaccaaaaccaaatgatgatttaacaattaatttaataactaatttatcaattcatttaatagtttcatttaaaaaatcaggtaattatttaaatgcaatttggatttgtgaaatttttcaatcacttttcccagataatcaaacaattttattatttcattcatattttcctattattagttgatcattcattctttaatccaggcttagctataaattttttacataaatcttatcattaatgatccttattatactaaatcaaatgaattttttcgaatatattaatgcatcagttggatgattttttaccttttttattattatcttatgcttattattatactgataattttacattatcatttgatagtttaacaagtttcaagtagaaaattaattaatccaagttacttaccaattatcaaaaatttatcaaaacaagttatatgataaatgtccaaatgaatcattctcgaaaaacttaaatgattttattaaagctttagatgatgaaaaggatggaattgaaaatagtaataataataataataataatgaggattataataatgatgatgatatcaagaacaataaaagaaatatcaaaaaagatattgatagtaggaaaaatagtaatgataatgataatgaaacaaaaaatgaattcccattgcatagtttgaatgatccaattataattgatttgattatgatgaatactgatgaaagagtttatcagtttaataatattgattttaaaagtaatataaacaataatacttataccatttagaaagaatataacacttgatagtttaataaatgatgtaaaggaattaccacttcaaggtttagaatatggatggaatcaaaaagagagaaagtttaataaattataccccgttatcaaattaccatcaagtttgccaattaatatgtatataagagataataatgataatgatagtgataagaataataatgttgatgataatactaaattccaataactagattaccaacaccagtttcaaacccaagaattaatactgatgttgttacaattgcttttaaatcaccaaaagtacagaaaagtccaaataataataaaataccattaccaagacctaaatcaactgaaaataatagaatgtcatttaatatgacaccacatcaatcaccacatgttaaaaacattactgttaataaaaacaataataataataatcaataataataataatatcaatatcaatactactaatgacaattcaccacgtaccaggcaaaatttacaaggacagaataatccaatgtatcatccagggcaattacatgggacaattacaaccaccacagggtcaaatgcaacaactacaaggtccaggtacaactacaaggaccaccgccgcctcagtatatgaattattcacagcaacaacaacaacaacctccacagatgatgggacatatagtacaaatgacaccaatgaatcatatgcaaatgggacaaataccaatgcaaatgggaccaatgaatcatatgcaaatgccaatgcaaatgcctatgccaatgaatcaaataccaatacaaatgaaccctacacaaataaatcaaatgtccaatgcaaatgaatcctacacaaataaatcaaataccaattcaaatgggtatgcagataccaatgaatatgggaccaatgagtccaattccaatgcaacctaatatgatcaattcaatgggtaaaaatattgaaattaataatggaaatgatagaaatattgaatatgtaccatttacaggatattacaattaatttattagttaattaattaatgtttaaaaaaatgaaacatttgtataattaaggttaataaatttattactataaattataattattcaaaaccttaaacggtttgaaacgtaaactctaaaatagagcaatccaggtgcatatattgaggactcaatagataacaccaattaacttatcacaataaatcgcaatgaataataacaagagggaggggttacaaattttattcgaggatattcaatgaaacgaaactgttattcattttcatgtaatatttttaaaataaataattttgtattaacttgccatcaattttgtcaagaaaattttttcgataataaatattatggacactatatcgataatatcttaaagatcggtctccgtatccttgtagcaatgttacaaaactactttattttaattgttacggagttttaactgtttcaagttttcaaaacgtgttgtctgattacaataagtaatggtgtcgtcattaatattaggataataaattggggggattgtttttcatagtatatcgtttctttttcttttttttttctctattaggatcggcaatacaagctggattaaattttagtctccaaatgggatcttaaaacaattaattcaaaaaccgaaaagacgcaactctcggcatttaaaaatagaatattttttgcttagtttaatttctttttgcattaaattaatagttacagtttacgcattttctataaccttctattctctattaatatcaattagatagttctagctccagtatttttattcgatgtgaaatgtaacattattgatgaaattggtaattattattatttaatttgtcttaagaatgtataaggtttgaattgatttaatgatttatgatagaatagtataactatcaaatcgggatatttttaactaaatagtttttttaataacgaatttaatagacctattcagccatttaatacaataggttcgctgaaattgaatttgtctatgggtgttttaaaagattttcacccattatttatttcaattttattatccttaatgaaagagcaaatttcacaacattatagtgagtctctaatttcgtagattgcaacgagcaatttcaatcatagcctcttggagtaatcttatgtgggaataatttataaaatgaaaaactaaggtatagtctttacttttttgtttgtttaaagtaataaataaatgaaaattgtaaaaaattcaaaggtaactaaagttgggatacaaacaactgaaattaaaggataacaattgacttatttataatagttcaagaaagtgaagtgataacagaaaataggacagctcattaacattttaaagtgaaaaggtgttagacttgttaactctctaggtatgacttacgtaataatatctaataataagatctactaaaggacgatttctctatatctctataagaatctatataagaagaactacataactattagttattcccacatattatatcctgtgggaatttgccctcttatacatatctcatgtaacgagttgccccgttacctatattatgatattaatactatcaatatatcatttacttacgtaatttatcttacgtaattatattctatatttatatcattcctgacatctcggggggttggaaaaatgtcagtaaatttcaatttgcttagcatttgaatttctttcaatcttatattagattaatttgttatatgatagcaattaatataataaccctatattggatttaattataaaaatttatttcagtcctatatcggactttctttatttctatttttataactaccctatattggacatagttatatttgattgaaatcctatatcggacttatttttttataatttaatcctatattggacatatttatatttgtttgaaatcctatatcggactttggttttataattaccctatattggacataattatatttgattgaaatgttttataactaccctatattggacataattatattcaattgaaatcctatatcggactctttttatttttatagctaccctatattggacgtagttatgtttgaattgaaatcctatatatatcggatatagttttattagattatattttttttttttttttttttttttttttgataaatactttaggtcctacataaatacattggatacagttattgcaaatgtatagattattttatatgcaaattttcctcttattgtttcaagttttttgtatagcaaaattcatcatgttttcaatatgatgttattacaatttttaaattgatttatcaagttcttcccttctaagtgagtctagttttttcattcttccaaaattatgttccatatttttccatactacttctccattctcaaacatatgcagatcttgcttatgttcacctccacattttttgcaatattccaagttttttgtacacttaaatgcaccttgtggtagttctggatataagtccgttccatctcttggtaaccagttataagtttcaatggcttcttcataagataatgtatctgctgttagttgttttttcttatctttattttcaatgtatctccttttcttaaaatcttctgattttccatcataaaagttttcattttcttcaacatcaattatttttttcattaattcgttttggattgaaagttttcctatttcttgtacgacttttatcatacttagctccgtatcattttttaatgcttcattaaactctcttgtaactactcttttgatgctgctgtttgaatcaattgctcttttctggtagcattaatatatttgttccatctattagtcacccaatcttgaatgtctttaaataaccaaacttctccttctaactttctttttttaatatttttgaatcttaaagaatcaattatatcaaataattggctatctgaatcaaataattcattagattttgcatgtttaataacatataatttatgaagtactccaacatgtgagtattccatttccatatcgctatcccataaatcagtaactcttttaacaatctcattattttttcctccttccaatgtattaactactgattcatacctatcatgaatttgaaattttgataacacttcacttaacttatattcagctaacttgatcatattaaatttgacatttttttttgtaatttctttatcaaaatcatcaacaattttaattttttcaattttataacctttactgtataagttttgtatatccttgttttttagaattttaccaataataattcctcctgttgaatcatatggtgtattatcaagaataaatttctcgactcgtttgtaccatgattctactgtttcagatttatttggattttttttcatcagtcaactccttgatagaatcgaatatttttcctttccaggattccaataaatctttgaatatcttctcctctgaattattacttgtcatatttagaactgcttttaacctgttagacttgttaactctctaggtatgacttacgtaataatatctaataataagatctactaaaggacgatttctctatatctctataagaatctatataagaagaactacataactattagttattcccacatattatatcctgtgggaatttgccctcttatacatatctcatgtaacgagttgccccgttacctatattatgatattaatactatcaatatatcatttacttacgtaatttatcttacgtaattatattctatatttatatcattcctgacaaaagggtatacatgaattttaaatatctgtttacgtaagcaaatatccctacaagctacacttcaaagttttgaacattattcagcaacaaaaaaaatacaatttttatcataaagttatacagtattaagtaagattatacatataattataattataattataattttgaaccatgaacaaaattgaaacctttattaacatcaactttaactttttcaactgcatgttttgtcattaaaacttccttttcagttaaataacctgggaattcaactaatttaataccttcttgatcaattgttattggtaaactaaaatattgagtatgtttagtaataaaaaatggtaatttaaaagtttctaattcatcaattttaacaaatgcaacttctttaattattttattaaatttaattgcatctaataaattatcaacaaatctatatgcagcagttgccatagataatgttgcactacctttaccatcttttgctttaacaacttcatcaccaccaaattgaactctattaattaatttatcataactttcattatcattaaaatttttattccaagaattaataacaggtacaattgaatcacctgaatgaccaccaattgttaaaacatcattatataaatccgttgttgaaactttattatttaaggaatcagataaaaattgttctaatcttaaattatctaaagttgtaataccgaaaactttctttggattataaacacctaattttttcaattcttcaactgcaattggtacagttgaattaacaggatttgaaataatacaaataaatgcatttggacaattaataccaacttgatgaattaatgatttaacaatacctgcattaattttaaataaatcatcccttgtcataccaggttttcttggtatacctgcaggtataataacaatatcactaccttgtaatgcaattttaattgtttcattatcatttttatcctttggaacataacctttaattaattgtggagttggaatatgtgataaatcagctgaaactccaactgtattaacaatatcatataatgataattcatcaatttttgtattaagtcttaataaaagtgataatggttgaccaattccacctgctgctcctaatatagttgccttgaccattattgattgtctttttacgttaattaattaaaagaagtaactataataaacttaaatcaaattatatgccatcctttccaatactttaataataattgacaaataaatttgataaattccaagattccaagatgactcctccatgttaaaaacaataggaatctccacttactgtttctcacttatcagggaaatttaaccgcacttcctctttcggtaatctgttgcgtctataatggcttatcgacgcgacatgttttttgtggtggtttatagctatttctattttcgtattataacatgatttttgatattatattaattttgatttattttattttattttattttattttaaggaatgtttaatgtacattacttctctttaccattaaacaaacaataaatggtatctcgtttggcatttcaatcatttaaaagattcaattctacatataaaggtcctgggaaatcttaccttcctctaaaccccattgataataaaccaactcataaagaactttcacctgctcaaagagcttatttagatagagttataagagttgatcaagcaggtgaattaggtgctgatttaatttatgcaggtcaatatttagcattatctcataataaaaaagttaaaccaattattaaacatatgtgggaacaagaaatccatcatcgtaaaacttttaatgaattacaaactcaatatcgtattagaccatcaattttaacaccattttggaaaattggtgcctttggtatgggatttgcaactggatttatgaataaggaagctgcaatggcttgtacagaagctgttgaaacagttattggtaaacattataatcaacaattaagagttttatcaaataattttaaagatatagaaaatataaataatggtcaaaatgatgattcaattgaaattcaacatttaaagggtacaattaaagttttcagagatgaagaattagaacatttagatactgctgtacaaaatgattcaaaaaatgcaagaccttattggcttttaactgaatcaattaaaggtgtttgtaaaactgctgtttatcttgctgaaaggatataatataatattttgttgttgttttttttttataataataatacaatgtttttttatagatattatactttttaatgaatgacttatgacctaaatttactgtgcttttttccgtttctttaccttttaattatcatcagtactcacattatattatatcattataaatattaacagcatttataacattagatgataaattctttgcatcagagaattcaacaattgaaattttttcaaatgatttattatctaaatttttatgataaccaatccaaattttatcggcttttaattcaggtgttatatttgaattatcgaatttgacaacttttgtaccaatcattttataaactgatttaacaacaattaataaatccatatatgatatataaccatcattatcacgatcatacattttaaatgcccattttaatttttcttcaattgaacctctggttgctatacttaatgatttaataaaatctttaaaatcaatactttgtttgttatttatattaaatgcttcaaatgcatatgctgcaaattcagttggatcgccaaatggataaaattgtttatgaattttgataaattcttcctttgttaattcaccattattaatatccctcttaaatcctttataccattgatgtaattcacgtgtagaaaatttagtctcttgtcttaaaatcgttatatcttcattacttaatttacttgtcttttgtcccatattgtccttgaatttaagagaaaaataacaatgtgatgtgcacctataactttagattaacacaaatgacaattgttctgtaacattaaatttatccaaaaaagaaaacattacgtaatacggtatacatacacacactatagaaggatattactaacacagattaaaaatataccaataaaactccatttaaggacagtttcttgtttaccaccgaatgaaattgcacttgcaaacatttgtaatgaaatgaatgttaaaaatcctgatgtaattgataacaatattgcaattaataaaatactaaatggatcatccatatcaattttatcatgaaacatataataaccaatcaatgcaccaaatggttgacttaaacaacctaatgaacctgcaattaataatgctttaaatcttgaatttaatgcaacatataatggtaatgtcattgtgaaaccttcaacaaaattatgtatgaacattgaaaggaaaattgacatacctaattcaggattcgtctttgatgttgaatacattataaatccctctgggaatttatgtaatgtgattgctaaaattgtttgtaaaccaattgataataatcttgataatggagttttaatatgatgatgatgttcttgtaaattatctgtttcatgagtactaattgacacaaaatcatcatttccataatcagtgtcgtgatcatcttgattgtgtgaatgattatcaatttgatcgtgatattggcgtgaattattatgactatgattaatggatttcattgataaatttgatatttgatgatcatttttagttgaatgatagtctgtgatattcatattattattattattactatttggaattaatggtgaatggatatctaaatttgggtatcttgaagagaattcatttttatcaattatcatatgttttttatttgggaaaaataataaattttcttcagttggtcttgaacaaaaatataattcatttgatttatgtttatgtaatttattttgatttataatattatcagtacaacaatcaatatcaccaaaacatttacctgacattttttcacctttgagagttttcaaagacagatcaattaatgacagtgatttctttggttgattaattggattatttgaatgcatttgagtataattaatatggggttgggtatgaatttcatgttttgattgaggtggaggtatcttggtttcatcaataatagtattattatgtatttgatgattatgatctggtggagaatttgaagctgaatcagttacagggtatgatgtattattaactgatctatcttgacttttatttgaagaatcggaacctgtaactgatgaatattcatttgaatgatcaagtaagttgttattggaatgtgaattggaatgtgataaagatctagtagtagaattatcattatcattatgactatgtccatgatcatgactctcatcatgaccatgatcaccatcatgagcacaatgaactaaactttcattagttaatagatgaataatcaaattaagtaatgaacataatacaataccaccaatatagccagaatattcaactaatttaagtaattgattatttgaatgtaattgaggtaataattttaaataagaatgagatcttggtaataatttgtataatgaagtaaataatagacaaccagatgataatgataatgaacatattaagaaatttgtatcatttgcaatatggaaaggtttcctttcagctcttttggggaataataatctataaattgaatcggtatatataacacaacatccgagaaatgtaatgattgaagtaagtagtaccaatgcccagccttgatccattgcggttataacaattctaatagcgggtataagaacgataaagtgttatttaaatatataataatgatgaacgataatggtagcaaagtaataaagtggtgattaattgagtgaataaggcatgtataaaggttaatattatcagataaagaagtaaagtactttaacggtcactagcaaggtgaaaattattttttttcttaataaagagattcatgatcatcatcagattcaccatcatcatactttgtaatttgggaggctgaataaggtattattacgttaaagtattacagtatattatataaatacaacacaaatcagaaaccaagaagttctactaagaccttgctgacttttctctgcaaaagctttgcttcagttgtccctatctagataattcatcatttatgtgttgtattagagaagtttagaaattagattaaatttagtaatagtaataatagtaataataatagttagagtagcaattacgtatactccatatacctctattgaagtagtgaattcaacagaacccaccacttgtcaattaaagcacaaacttacagagatgaatcaaccctagggaaaataagcttagtatttatagtggtgaaatttcattttggagcgaatttaccactcagtgagggtttcttaaaaggttttggaggctctgtacatgtttatttatgatttatttatttgcctttgtggttggttctttcttttgagtgtatattcatttattagctgtatttatgacagttatcggttggaatgtttagtatatggcccttttacttatatatcactctatcaattatctaactgggctttatattggattttctcactattgtattagacttgtccattgatattgcctaattaggcaatattacactttgtaatgattcatatcactttaatcaaatgtttttaatttcttttgctatgtttcatattcattaaccatattttgatctaaaattttattttaagtatatagagatatgaacatgtttgttatcagttttcaatgttttaaattggtttctaatttattatttcatattatactatattatttccatcattaaacagagtacagtcaaatgtccaaagataaagaatttgataatgtttttgaatcaactgaatcagttattaatacaccaacttctgtgtatgaatttgataaatcaaaaattaatcaatctatgaaagaaaattcaactgttgaaaatgaaaatgaaaatgaaaatgaaaatgaaaatgaaaaggatgataaactacaaaacactgatgatgaagacttggtaactaaaaacccattccatttctttataaaaaaagatttcattttactcattcctgctcttatcactaacgcattatgttcagttactgatgttgcttccacaattatgattaataaattattcaaatatttaacagacttacaaataggtaaatatacaaattcaaatgattttatgcatgatatcaaatggccttgttttggcataattttaattggtttaggtacaactttatttggttggatggaaacatcacttttcacttatcttggtgaacgtcaacaaattaggtgtagggaaaaattatataaatctttattatctagaaacttaagttggtttgaaaataattctaacttagatggtgatttaattcaattaaatagatcaatagaagaatttagaagttcaattagtgaatatttatcaatattatttaaaagtgtcttctcaatcatctcattaataattatttcaatgttttattcttggaaattaactttactgttcatgtcagttattccaatcatttttttaacaattgtcatattcggtaataaaattgaaagatggtcagaggaagaagataaacaaacttcaaatgctatttcaactttagattggaatttcacttctttcatttggattaaaatagtttattcaaaagatttggaattacataaatttaatgatttattagataaatgtgaatttgcatttagaaatttctctatttatgcaaatattgtttcttcagttatgaaaactttagctttattattatttgttcaaagtttttggtttggttcttatcttattagaacaaatcaagatcaaccaagtgatattatttcatcattttattcatgtcttaagctagcaatgacaattagtcatttatcggttattgcagttattttccaaaaggcaaatacatctttcaaaaaagttgtcaaatttttattatctgatgaagaaattaatgaatttaacaaaactttattaatcccggatgaaaatttgtatggtgatatcaaacttgataatatagtgttcaaatataataccaaaaatactgatgataatgctagtaatctagagaaggaaaatacagattcagatttagattcaacaattttaaaaaatgtttcattacatattgaaccttttagaactacttatttaattggtaaatcgggttctggtaaatcaacaattgcaaatatcttactaaaactatacaatccatcaagtggtttaatttcaattgatggttatgatttacaagaattagatactaaatggttacgttcacagataactttagttcaacaattttctaaaattttcaatgatacaattgcaaataatattttacttggaacaaattatgaaactattgatacatctgatgttttagatgctgtggaatacttcaatttaactaatgttattgaaaatacaccaaatggatatcaaacaaaacttggtaaaggtaatgcaaatgagaaaaatgttcaatttagtggaggtgaagaacaaagattaaatttaattaagtctaagttaagaaattccagtattttaattttagatgaatctatatcagcattggatattcaacaacgtgaaattttcatggataaaatttataaatggagagaaaataaaactacaattattattacacatgaattatctcatattagaaataatgatatggtattctttattgaacatggtgaaattgttgagaaaggtttgaagaatgatttaattgcaaatggtggtaaatttcaacaacttgaaaatcaaggtgattatgaaagtgaatccaataatatcaaagaaacaaagaaacaaaataggaaatccatttttgaagaaattaaagaaaaagaatcattatcaaaggatgaatactttgatgttttaaatgaaaaagaagaagattcagaacaattaagtaatattagagcacctattttaattgcttataagttattaataagttctttatcaattaaatacaaattattatatctttttggattgtttgttactgtatgtgaaactgttttgacaccagtgttttcattctgtttttctaaattaatcaatggtataattccaaaagctcatggatcattaattacaaatggtgatcaagtcaaatggtcaatgattgctacagctattgctattcttacgggtttactttcatttatcgcaactactaatttagaatttacatcagctagattgagtaaaaatttacaatcattagcattagttaaaatacttaatcaaaatataccattttttgaacatttaaatgctaatgaactttcaactttgttaatgaatgacatcagagatttccgtaaagtttattcatcaaatttagcaagattagtatcaggtattacaattagtattgtttgtattatttggacattagttacaggttggaaatatgcattagttggattcagtatgttcccattatttgcaatttttagtttcatcagtactttaatcatgcaaaaggctgaattttcatataaggattcattaaatgatgcagaatctgttatttatgagagtagagttggtatcaaaacaattatgtgtttaaatgttcaagatcattttagagaaaaattcacgatcaagttaaataaagttttgaatgatggattaagaagatcaattgctattggattttcaactaatatcatatttatattggttaatattgcacaatctattatgttatattatggatttaaattagttgcagataatgaatatacattagttcaaatgatgcaaattattatgatgattttaatgtcagtcacatttttgtcagagttaatgtcatcagcccctggtttatataaaggtttaagagttgcattgaaattagatatgctaattttcaaattggatgataatgttggcaataattctggatatttaactccaaatttcaaaaatttacaaacaaatgattgtatatcattcaaaaatgtttcattttcttatccatcagatactaacaaactagttttgaaagatttcaatatggatattccaaaaaatcaattaatttcaattgttggagaatctgggtgtggtaaatcaactgtgatgtcattaattttaagactctattcattatctagagaacataaaagtttagaaggacagtatccagaaagtgaagaaattaaaattgatggttatgatattgaaacaatcaaaatgtcacattttatgaacaattttggtgttgttacacagaaacattactttttcaatggtacaatcaaggaaaatttactatacggtaatccaatggcccattccgttttggatgatgatatttgggatattttaaataaacttggattaaacgagatggtacaatcattagaaaagcaacttgatgccccattacgtcaatctggtaatgttctcgtttcaggtggtcaagcacaaagattatcaattgcaagagcattattgcgtccatccaacattcttttaatggatgaatgtaccgcctcacttgatgcatattcctctgatcgtgtcatccaattattatcacaattgaaacattttaacaagaccatcatctgcattacccatcaagcccaaattatgaaaaaatctgacgtaatctttgttatcgaaaactgcaaaattgccgaatctggtgattatgagaccttgctgggaaatggtggtttcttctataaaatgatcaattcccattcaatcaattgaagcccactttcattttgtactttggtatatttgtatataatctatttcgtatttctatcaattgttttaaataattgaagctgatcacaatttttgatatggctaaatacattaaagttccaacttttaaattaaacacaggtgcaacaattccagcaattggttttggaacctggagatcaactgaagaagaagcatacaatgcagttatcaccgctttgaaagtcggttatagacacattgataccgcatatatttatggtaatgaacatattgttggtaaagcaattaaagattcaggtgttccacgtgaagaaatctttttaacaaccaaattatgggcaacaggtgcaatgaaatcaaccgaatcattagagaactcagttaaatcattaggtgttgactatgttgatttatatttaatgcattggccagttacaatgaatccaaatggtaatgatgataaattcccttcaaaaccagatggtactcgtgatgttattcctgaaagtgaatggagttatgttgatacttataaatcaatggaaaaattattagaatctggtttaactaaggcgattggtgtttctaattttaccgtttttaaaatgaaaaaaattataaatgaatgtaaaattgttccagctgctttacaaattgaattacatccattattacctcaacaagaattagtcgatttctgtcaaaataatggtattatcgttgaagcttactctccattaggttcgattggtgctccacttttgaaaactgatgaattaattaagattgctgaaaagtataatgtttcaactgctgctatttgtatctcatggcaagtatggagaaaagttgttcccttaccaaagagtgttaaccctgaaagaattgaagctaacttgaaaattgttgatttagaagatgctgatggtgaagaaatctctaacttgtacaagattcacggtgttcaaagatttgttagtccagattggggtgtcgtgatctttgattaaattcaattagattaaattttatatcattatttttaattatttaactttcttatatactaatttacttatttaacaattttttagttaaaataaacttttttattcaagtcattataaatgaagaacagcataaggaacgtctggttcttcgccattttcatcctctaaacagacttctaaaatcaagttcttttcatgtgcaggtagtggtttcttagtaactaattcaataatttcagtaatcttcatagaatatcttggttccatctttttaacataaaatgatgcaaataaaagtgaaacaccatatgacatcattgataattctaatccttcattctttttaaaatattcaattacatcattcaatgtcatatcaccataaagatcaaatctatcccagatcttatcgtattctttattaccatatttacccttagcacttgcaactggttcagaaaatccaaagaatggtaatgccaaattgacaaaaccattcttatatttctcaatatcagtcttattatctgcaactttgtaaagttcaagacaaactaaaccagtaactaatgcagttgtagttgcaattgcaggaataattctacctgcaatgaatttagtctttgatttatctgcaacttcaatttcataattttctgcacgacaattagatgctgcattaatgaattcaatatgatgattactatcatcatctttttcaaactcaacagttgataatctataaccagctaatgatgatggggatggtaatgttgatgataatgtttctataacagaattatcattaacagcactgccagcatttggatcaggatcactgtcattaacttgaatctttaaatcagtctttggactccaagctggaatttcaatcttacttaaaacattagcataatattctttatttggagcaccttgatcaccctttaatccataaacaaatgctaataagttagcagcacctgaaacaaattcaaaatgattgatgtcattaatatcaaaaaccaatggagttggagctctctttggactagtccagaagggttcacccttagatgtaactgcatccttagggaaattgtataataattgtttaatatcattagcaaatttttcttcaaactttaatcttgcccatttgatacaatcttcaaaattatatggtttatcagttgttaaataattatttattgattctaaaatagttttaatatcaccactttgctttaagacagtttcaacaaaatttggttgtgaaaggtataaattaacattttctggggaatcatggaaataatcttggaataaagattttgcccaagcaattgtatgatcaattttatttgggaatgatcttaaagtacataatggaattgacttctcaggtggatctctagatgatgaatatgattcagtcaagtttggaataacaacttgtgtattacctttagtacctaaagtacctgattctaataatggtttcttaaagaaaacacatcttctatcaacataagttctagcttcaacattatctaatgcatttgtgacaaaatctaagttttcccaaaattcattattaaagatatgttcagtttcttcaccaaccttatcaattcttgattcaattttaccgattaaatcaggattcatttcacaaataactcttgatgaaacatctgatttatttaatccgacatcctttgatctaaataagaattgtctatttaaatttgatttttcaattgaatcattatcagttataaaaattttaccatctggaccagttgcaatacccatcattgcccaattctttaacatttcacaaccaattgcacctgaaccaacaaggaatatttttaaatttgccaatttttgttggaatttcaaaccaaaaacagcaatttgattatcatatctagaattaattggtttacaagtttcttctgatctttcatattcctctgattctggcaatgattctaatgaatcgaaatataaccattgtttaattggaacgaatttccctgaacatgcctttaaaacttcttgtgccaaaagaccaccaaagaatgcgaccattgcaggtaaatcacctcttgcaccatatgcaaattctttgattaaatcatcatcaattgaatcaacggaatatttggatttaagattgttagtgaattttaagatttctattgcatcagtttcattgtgaggtcttggtagttcattattatgaactttacggaattcatctaaagcttggaaagctaaatgtaattgcattggtctatcaaattttgcgtaatcagagattaagaattcaggctctaataattgttttgctaaaggttcataattaacattaattggagttttaacttgagtataaataccacctttttcatatgtaccccaattagcattgaaatcaactaattgaaatgcgaatggacctaaaactttgattttataaattgaaccatcttcatttaattttggtatacctttaacttcagtaaatttaacataatcattatcttccagaccgtgtctattatcatcaagcattgtaacagtaccatctttttcaatatctgagacaataccagtttttggttcttcaccattttgatcataaatagtgaaattttcaccaaaatcaacgaaagcttttgcaaataaaccattaatatcagctgaaataaatttaatattattttgatgagtaatttcatttaattccaattgtttatctaatgataagttagttgcgacaacaacggagaaggatttaataatttcaggtgataattcatcaattgccttaattgggacatattgatttaattctgcaagttttggtaaagttgctgaagcacgagattgaccaatatcttgaacagttaagaagaattgtgatgataaatcttgaattgtaacagaaactggatcataaatagttaatgatttaacaccggcaagggcaacatttttagcaatttctaaacctaaaccaccaagaccaattataagtacattggatgaagccattttcagcattgcatctttacctaaaacgtaaagttgtctcgaataaagagattcatcaatagcaccggatggagtaggggaatctgtaggggttggtgtgtctacttgcatttgtcaattgataaaagaaagatgtttattaataattctattaataatgtaccactgaagtcttagtaaaaggtccaggtggcgaaaaaaggcctggattaaaaagagttgagactgtggaagcgatgtcaagatttttacttagtaagagttttatccttaataaatttattattaatcattacattctactatttcttcttatagtatagagaatatgcttaagtttaatgcgttaagacgttctgctatgcaggtacgtaagttagcaactgctagtgcagttagtaatacaagaatgactgttttaccaaatggtatgacagttgcaactgaaactataccacatacattgacagcaacagttggagtttggattgatgcaggttcaagagcggatgttagtgatgaaacttcaggtactgcacattttcttgaacatttagcatttaaaggtactaaaaagcgtagtcaaattgatttagaattagaagttgaaaattgtggatcacatttaaatgcatatacaagtcgtgaaaatactgtttattatgcaaagacattacgtgatgatataccacgtagtgttgatattttaagtgatattttaacaaaatctaaattagagaaaactgctattgaaaaggagagacctgttattattagagagagtgaagaagttgataaaatgtatgatgaagttgttttcgatagattacatgaagttgtttataaggatcaaccattaggacgtacaattcttggacctattgaatgtattaaatcaattcaacaaaaagatttaaagaaatatattgaaactaattataaaggtgatagaatggttttagttggtacaggatgtgttgatcatgaagaaatggttagagcagcaattgaaagttttggacatgttccaattagtgatcgtccaaaacctttaggtacaccaagaagtggattaccagttttctgtaatggtgaagttaatgtaattgatgaatcattaccaaatttatatattgcaattacattagagggatgttcatggtcatcaccagattattttacaggattagttgcacaagcaattgttggtaattgggaacgttcagcatctgttggtcatacaccattagcgaaagaagttggtaatccatctaatggtaatgcaccattatgtaattcatatatgtcattttcaactagttatacagatacaggattatgggggatgtatgcagttattgatagagatgatgcaggtgcaactacaagatgttcagattttataaatgcacttaccaaagaatggaaacgtattcaaagaggtaaatttagtgatgatgaattagaggcatcaaaggcacaattacgtggatctcttctcctttcattagatggtactactgcagttgcagaggatttaggtagacaaatggttacaacaggtgtacgtctatcccccgatgaaatagtggaaaaggttaatgcagtggggagagatgacgtaatgaaatggctacaacaaaagagcggtcgcgtcggtgttgcgtcgctcggcccatcgacgctggaagtaccaaattttaaagaaattgaagagaaacttgtcatttcctaagcttttatactgtcaatgctcttctgattattgttagactgtaaataaataaataaatactcctttttatataaattttatatcctttatattcctttattctttacccaattgagcatgtctgaacaagaaatcctcaactctataccatcacatgttgctccacctccatctggtcaaactgggttccctggttatttgacagattcagagaaatcagcccttgaacaattaaaattaatgttagaagctgaaggttatgttgaaagaactgatgattcaacacttttacgtttccttagagctagaaaattcgatattatgcttgcaaagaaaatgtatgaagattgtgaaaaatggagaaaagaatttggaactaatacaattttaacagattttaattatgaagaaaaaccaatagttgctaaattttatcctcaatattatcataaaactgatattgatggtagaccaatttatattgaagaattaggtgctgttaatattactcaaatgtataaaattacaactcaagaaagaatgcttaaaaatttagtttgggaatatgaatcatttgctaaatatagattacctgcttgttcaagaaaagctggtgtattaattgaaacttcttgtacaattcttgatttaaagggtatctcaatcactgctgcttctcaagttttatcatatgttcgtgaagcttcttatattggacaaaattattaccctgaaagaatgggtaaattttaccttatcaatgctcctttcggtttctcaactgctttccgtttatttaaacctttcttagatcctgttacagtttctaaaattttcattcttggttcaagttataaaaaagatttattaaagcaaatccctgctgaaaatttaccaactaaatttggtggtacttctgaagtttctgaagaagatggtggtctctatttaagtgatatcggtccttggagagatcctcaatatattggacctgaaggtgaagctccaagagctgctcatatttaagtatagtttaatatatcaattctaatttctaatcatatcttaaaactaattagttataaatacacaaatatatcatacataagcctctactaaatgaaaccattttattttatttatatgaattttatctatattatttattaaatacagtacttttacgtttgaacagtttgaaccatttctttttatcttcagtaattggtggtgatttctccttcttaagttcaacaatcggtacttcagcacgcttgataacttttggttgtgatttaacaatagcaccacgttgttcaattactttcattatttcattgaatttatcaggtgatgtcttatcactaccataatcatcatcgacatttgtttgaacaacttcaccattaattattgatatattctcataaatataatcaatgaactctttccaacttttatcatcatatatttcaggatcttcatttttttctaaaatattttcaatacttttacattctcttactactttttctgcagcctttttgatatcattcatcttaaattcatgtttagataataaattaccaaatgtttcatcctcttccttaatcatcgatgtaaggaaatcgtcttcaatatcatcaaatccctcaatttgataatctttaactaattcatcctctttcatattattgttaaattcttctctcatttccccttcttgttcatcacttgttaatattctaattaatttgtccatactcaaatatttatcaattaaatatgaagtattctgttcttcattattaatattactattgttattactcatattgaataatttttcactgaaatccattttcttcaatgtaactttatcaaaataatttaatacttcatttccatgcttctttataaaatcttcatttaatttcattaaataactctctttatgttgttgaaattcacttctatttgataacatcatcaatacttttgcaattaatattaatgtacgtgatattttaccagaataatgacttcttgataaattatataattttggattcagtattgcagggcatataaatcttaaaaaaataaatgaactcaatgcatttaatgcaacatctttgaattttgcatcatctggtccgttatttttcatctctgtctcaactgataattcaacattcattcttaagattttccattgtttctttatatttgatggtatatcattagttgaattataaattctattccataaatattcaagatatgttaataaattttgataattttcctcatatgattcaggttctatttttggatcgcattcacaattcaagtcttcttgttgaattttagcaataaattcacctaataatttttccaaatattcatgtccgactcttaatgtgaacttttctaatgattttgataaaattgaattaccacggaaaattgtattgtatttgaataagatttgttgttgttcttgatttttgagtaatatattagaatctgagagttcatacttaattaaagtttctaaatattcctcttccttttgtaaactttgataaatatcaagtaatactgttgaccaagattctaaatttttggttgtacatttaggttctatatatgaaataagcatctctattttaaaattttttagaatattttcaaaacttttatatttattagttgatagtatattattttcaaacttatccaaattaactattaaatctccaataacttgatttcttaaattataaattggtattttccttaaataattgatttcaccagctaaatcatccaaggtgataaaacatgaacctattatctcatctgaattatcaccttcaatttcataagtatctctattatttgattttttaattaataatttaatctcattattatttgacattggtaattcaatttcaattaattctttccagaaagttgataataaatcatcaattttaacaatatcacttctgaaccatggaatatcccacataattaattcacaataaaaccatgattcatcattagaattggatttatacttatcattaaattgtgattccattatttccaatgatagttttcgttcatttcttaaataaatatctttaatgaatttatttcccaaatattctaatcttgtaaaagatttcaagattataaaccaattctctaaatcaactcttaaatcaaaatcaatcaataatttatctaattgttctaaattagatgttttagatgttagattatgactctttcgtaattcctcaatgacaccaaggtataaaacatttgaacttcccagtattgaatgatgtaaaatacgtatctctgattcaaacaattgttttatatcaatttgattcaatagtatgtcatttttatagaaaaatttcaatacaccatgagaagttatatgacaatccactttaaaccatccataatcttctcttgtatataatggattaattggagtcgtatttatttctatatcatcaatctcattcggtattggagcataaacattcaatttacttactaatatatcctcttcaggtttatttaagtctacctttggattattgtataaccatttatttaatttgccactttgacgtaaatttttccatacgattgttgtacttaaaaaagttgtataatctttgaagttcttaaatttgaataaaaatgatgatggtaatgaagatgatgacaatgatgttgaatttgtaggaaccgttatttgtaaaacataataatcttgaaatgttttaatgttgcattcgtgaatatcatttattataatcagggataatccagataccaatttaccattatttaataaggataaatcaacaaatttccaagactgaaaatcgaatttgctatatgaatgagaatattgctggtttgcataagcccattgaacattgggtatagtaactctaccatttttagtgatatcatattgataagccaattctttcaaatttgaaagagtgtcactaatactaccattatcattatctgtatttgaatttaagctaactttcgaattagaatttgaaattgaaattgaagtagaaatggcgttagatgaattatgagtaggaattggcgatatattttgatttcgcaacatagaagtatattcaggcattgatataatatattatgtgaattaatacaatactattgtaattgaattgacaagcttgaaatatataagaaccgtttaacgtagcagcttatagttgaaaaaaaaaacagctataatttggatagttataattatagtaaccaattgcttagaactgcctatagtatgtaataaaatttatagcagcaaaaattctcgaatttaaaaattgataagcaaatttcgataaaacacaatgcagctgagcattcctaattattatatcttttacactctaaagcattattattagaatatcactcttctgtttaattacttatttacttatttacagtcatacttattataagaggatcatcttattataggatatatactttttaaagaaaaagaacaaagagaacaaagaattatagaagaagagaggcaatgcgaggtaaccaattgaattactgtgaggcaccaaaaaaagaattgccttctcttataaagtggtagcaacttgtatttccttttgtttatgactgttttaccttctttcctcctttctttctttcttttggcacctagctacacttcaacaacaacaacaaatacaactacacccaaaccttcaacttacttaaagaaacacttttattctgtacttttattaatactttctcgtagtattcttttcttggctttgctttgctttgcgttgcttcccaatcatgtcggatgctgtaattgatttcttgtattccatacaccaacttaagttccaaataggttatatgatatggagatttcttgtatatttctccgttggtttcatctctgcaacaatcattgatttctttataaccccaagaccaattaaaaatttaaatatggtttatactccatttccaattcttaatggtcttgaaattatacttccaaaagctaaaagatgggaagattcaccttgtattcaatttcaaaatttagctaaaacttatgatgatgtttatcaaataaaatttggtaccaaacttataattgttgctaatagttatgaatctattaaacaactttggtgtagtaaaaatattaaggctaataattcaagacctatcaattatagctttcataaagttttatcaaagggaatctatacaattggtacaactcccattggtgaaacttataggaaatcaagaaaacatattagtgaaagagttttgagtgataaacgtaataatgattttaattatgttataatgaataatgcttgtgatgaaatgattgataaaatcataaatcaatcaatcaataataataataaaaatgatattgatattgacattgacattaaaccaaatttagtttcaaatgatatggttaaggaagcacaatatttccatttaaaagttgcattatggttaacctatgggtttgaatttaatattaatgatttgattcatcaacatttaggtgatgagattattgatgtggaaaataggattactaaagttagatctcatgttcaaaatccacaagattatttaccatacatcttaagattaggttttaatctttgttcaacaaaaaattatgagtttggtgagctctataataagagagatagatatttgaaaaggttttatcaatatgctctaaatctttatgatgatattaatagtggtaaaatgttgcataaattacaaagccaaaataattctacaaatgcaatcaataaaattgaagatttaaaaaacactttaatgtataattattttgatgatgcaaaatctaaacttgcaattggtgaaatcacttcagagtgtcttacaatggttagcgcaggtcttgataatacaccattaaatttcaagtatggattacatcaaatggttaattatcatccggaaatttgggataaagctttcaatgatttaattcaatactataagaatgattatcaacttgcatataaggaatgtgctaatgaaatgaaaagtgaatatgttaaagcaattgttaatgaaactttgagattatttacagttttaccaatgtcattaccgagagagagtacagatataattgcctataaagatgcaattattccaaagggtacaaccttatttatgaattgttgggcagctaatcatgatccaaagaaatttccagatccaatggaatttgttcctgatagatggttaataagtatagttgataatgattttactgaaaagatggctattgatccaactatgaaacattttgcttttggtattggatgtaggaaatgtcttggtaataactttgcatttagagaactttacattttattcagtaagatgattttaagattcaaacctaaacctgttacagagaggaagtatcaaacaattccgtctgataattcattaaaattgaatcaatacccggaatctcttgcaattgaaccggagccctttgacttgattctagagaggagaccatttgatgcagatattgtatagggattgtatatggtaaataataaacagaattaacaccgatccatatgtactgcgtctattaatagataaagatcgatagacgtggtgctatgcaaatcccgtcgttatcaataagataaattgctcacattggatcatgttcattcggagataaatacacgggcttgggtaatataagtatttgtataaggttaatttctttctatataagttactgtatatatatcttcttcctgctctttactcttagttaaatagactcttattaacacaatggaggcattaaaagattttgttaaagaagttgtatcaacaaccactcaaatcgcaacaggtgaagaaaaaccatgtcattcaatgcacaaaatgagaaaacatcatccaatgggtgataataatcatcatttcaatgctaacaacgtgaagatgaatcatgatatgcaccacggtatgaatcacggtatgagtagtaaaagtatggatcatgatatgccaaatatgaaaatgtgtaaaatgtcaatgacatttaatagtgattatgaaaatctttgtattttgactgataaattaatggttacaacaaagactcaattagtatttgcaatgattgctattgttttattttgtatgggttatgaatattttaaattatttcttgatcaaatgcaaaataggtatattcagcttaaaaatggtaattttgcaactgcaagtgaatgtaagaaatttaagacaaagatttcgattacttatgctttaagtgttggttattcaatgattattatgttattattcatgacttttaatacttggataatgttatctgtttctattggtgcaggtttaggtcattacatttttgattcaccaaatgtttctgtttcttgtcattgaatatgtgtccatattttctttatctctttttgcttgttttggtcctttttacttctttcttattgcataagttcgaataactatttttaaagtttattaaatttctaactacataaataaataaatcaaattttacgtttctaatacataataccccaatctgatgttataagaactttaggatttctaataacaaaataattgtcctctggagtataaataatttcagattcccattcttcattcccttgtttgatatctgccttttggggtatattttcaccactaccaacaacaataatcttattgatagtaacattattatctttcaatgattttacaaaacctgatgaattattatgatttacaactccttcaataactctctttgaattatctgcaatgaaatcaacttcaagataatcatcatctttataaccgaatgtttcaccatcatcaacatataattttcctgttgctaatccatttgatccaataaccacatataatgtatatggatcatacctcattaattgagctgatcttctgtatctatctttagttgtaataatatttccactcttgatataaacgggtattgtatttagtgtcacttttgcattgacagtttgacaacattcaatcttttcattcaagttgaagaaattatagtaagtttcttcatcacatgggaaataaatatcaacagattcagcattttcttcaacaactggacgtataaatagaccattcataaagaattcattatcaatgtcatatccatttaaatcgcttggattctcccatattaatgatttcataaccggttctccagtaatactactcttccaaaattgagtataaaacaatggcagtaatttatatcttagcttaattgcatctctcatataatctgtatactcacctcctgcaatccaaggttcacgtcttcttgaatctatatgggcatgggctctaaaaaatggataccaaatacctgtttgataccatctaactaataaatcacttgttggattaccaaaaaatcccccaacatctgcacctgcaaatgggaatccaacagcattcattgttaaaatcattggaactgtttgttttaaatgctcccatgttgacatattatcaccagtccacattgctgcggttctttgagaccctgcaaaaaatgatctagttaaaataaatggtcttttacttggatttctatttaataatgagttatatgtaagttcatgaaatgataatccatataaattatgaattgatctgtgttcccaatcattgtaatgaaccagatcttttggagccgatgtttcaggtccattaaaaatagatggttcgttcatatcattccacagatgcccattagtggaatatccaagcagatcactaccattgataaattgtttattccaaaatgcctgtgatttaggattcaatgaatcaatccaaattgaatctcccggccaacaatgtccatgatatgtcttttcaatacttttactattgatattttgtatacctaattgtgtatcaattattaagctggaaatatgataatcacttttaatatgtggatcaactataacaactaattgacgtctagtttcatccaaaatagacatcattttatcagggttagggaataatgatttatcccatgtaaaaaatttcttttcatctgtgtattcaatatctaaccatatggtgtcataaggaatttcatgtttatcaaaattagaatggacctcaagcagatcctcttgattattataattccatctacattggtgatatccaatcgaaaataagttaggtaatgttgttgatccggtgatatcactatatgcttttgaaatctccataggagttgatttaactgataaaatgacatctattataccattctccgacatccaatgtgttttaactgaagtagttgaatcatctttccagataaattgggtatctttaaaatcattcgccacgagatttttcttaatatcaatgtatgtatctgcagaattaatccagaaaatagaagcagcaacatcttccttaactgcgatcattaatgggattgaaccatacattgacagtttgctctgaacttcatattcaaaaatatcaacattaaataacctgtaaggatctgaattagtagtatcttttaaagagaatgagtcagagtgttctgggataccataaacatgagtataatttacaaaagtaaaatccaaaccaactgattcaggacctaatggtaatgtatcacttttagaatctttaaaagtatctacaaaactattaaatttagattcttctaatgaaacattaatttgatcaaattcatcattttctctataatgttctaaatttaaaaaatctcgatcatttaaaatgatttgtttgacattattgtaaaaaactgtgattctaaatgggtgcatcataataatacttttatattcattattttcaccataaatcattgtaatttcatcatctaaaatttgataattaaatgatttttgagtcagttctgaattaaatgcccatatactagcttcattatacctctcaggatttactttaatatcttttgttatttctgatttcctatccctttcatcaagtttgaatctcaaattatagtcttcaacaatagatatctcaaaaacaagatccttaaatgaaccatcattgagctttttttgcatcataccgttaaataagccattttgctcgtcaataacgaaagtcgatctatctagttgatatttaggttcgtaattctcaaatgatttggatatttcggaagcaaagtgtcgatttctatgacaaaatccattttgttcacatttcttgaataaatattcctttactgcatttgatggtgcaaataaaaaaagccatgtaacacagtaaagccattgaattatcattattgtacttcacaattgtagcaatcagacaataaaaccattctttcagcatcacctgggtcttcttcacattttcatgtagcgctgggttttcaaatttttaacgtgtttccgtttgtttactcttcatcttcaactatttcaagggtatatatcctcatataacgaagacaaattgatgacaggagagatattgacattacaggcaggtatgtagttacactattattgaaaaattttaattttgaatactaacataactattttcaaatattttttatttttttgttcaggtcaatgtggtaaccaagtcggttcacaattctggtcacaaatttgttcagaacatggtatattgaacgatggatcaactgtggaaaactactctactattgaaaggaatgatcatccagatgttttctttaagagaagtataaatgaaaaatatacaccaagagctattttaattgatatggaaccaagagttataaattctgtagtttcacgaaaccaagggttatttgatccaaaaaatatttttatttcatctgatggtggtggagctgctaataaatgggttgaaggttatgttaatggtaaaaaaaatatagaaaaagttttagaaatgattgatagagaattagatttatgtgataatctagaaggttttcaattagttcattcggtttctggaggtacaggttcaggttttggttcatatttacttgaaagtttaagtgatcgatatagtaagaaactaattcaaacagattcagtattcggagcttcagaagttgtcgttcaaccatataatacaattttaacattgaaaagattaattcaaaattctgatgcaaatatagtatttgataatgcatctttaacacaaattgtgacagaaaaattaaggattgatacttttgaacatgatatacctaacaaattgatatcaacagtaatgtcagcttcaacaaatacattaagaattccctcatattcatataattcacttacaagtatagtctctactttaataccgacaccggatttacattttcttacaccaagttatacaccgtttacatcagattatgttagaaatgcagcaaaggaaattcgaagaagtacatcatcggatgttgttttggatcttttagataaaaatctgaaaatgtgttgtaagggagagaaagaggaaacagttttagcaatgatggatataattataagagagaataaattaactgattcaaagcaaagtatcaatatacagaaaacattaatcaaggctaaatcgagactaaattttgcaccatggactacatcatcagttcatttagcaatgagtgaaaaatcaatattcaataagtctgataagaatgatgatatagttagtggattaatgttatcaaatactacatctataattaatctactcaaaaaggagattagaaattatgaaaaattaatgaagaaaaatgcatttactaataatttccttaaaagtgattatgatcaagaatgtggtgatattattcaagaacttcaagatagtaaagatgttgttgaaagtttaattcatgaatatgagaaaagtgaaactatggcttatattgaaggctctgatgatgaattagatggtacaaatgatactgaagatgtaattatgcagtaattatgaagttaattgattagagtttatatattattttgtattatagtttatatagttttattattagaagataagacgataattgtactatattgttataaacacaggtaaatttgagtgatacagataagaaaccccacgacacgtattttgttgtgtttttaaaaatgtttaagttttagcatagtttttcaagatcttatgactgtattaaactttataagcactgctactagtacactggctggcacaatgttattttaatggtatttaaaacaaaattagttaattttgtaaattttcaaaaatagaaccttaatcaaacattcaaaacaatttagttgttcaaatttaattatttcaaaaaaaattttttttaccaaaatttaccactttcagccacccaagagtgcctccatactccccctcttttatcatactaaatttgattataaaatatccaataatgtacacattatacaccatagaacataatacactgttactaacggtcctaatcgcttaagtccaccctctcggaattattaccgcattcagaatgaactgataagaaaaaaaaaaaaaaaaaaaaaaaaaatgaaatttccagataaattatcaacttaaaagaacaggtctgaagccgttaatgatcatcgactaatctctttgatgttgattatatctacactataatgcgtaatagtgctgaatacgaagtatctgcggatgttgtctcattcagaccacattctctgccaagtacacattatgaaagacgtccatctattgctatgagcggtattgatccaaatttagatgactcagattccgaatcggattcagaaattgaatattcatcaaatattgaggatattaatgatgatttaaaattcaaagaaggcacagaagttaatataataactgaacatgttgttgaatatccagaaggtggtaaaattgcatatttaacattatctggatgtttccttggattagttggagaatttggtctttggaattcaacaggtgcaattgaatcatacatttcaactcatatgctaaaaaatgataatgaaattgcaatttcaatgatttttgcaatattttcattctttgttatgtttggtacaatgatttcaggtgttatctttgataaatatggtggtaaacaattatgtttaacaggtacatttttaacaacatgtggattaatggcaactgcaaattcaacaaaaatttatcaatttattttatcatttggaattgtttgtggatttggttgttcattattaactgcaccatttgttacaagtattggtcatttttttaataaaaagagaggtagagcattatcaattgcaatgccaggtgcatcacttggtggtgttatctggccgttagtttgtagatcattatatacacaagttggatttgaatggacaatgagaactttaggattttgtattggtacaattttattaattggatcaattttgactcatgatagacataaagagattaatagaataaaaagattgaatgaaggtgatggtagtggaatgtcatttacagaaaaagttaatgatttacttgatttcaaatcatttaaagatttaacatttatgattcttacatgtgcattatttttaaatgaattttcacttttaatggttagtacatatatcccatcatatgcattaagtaaaggattctccgagagtacatcattaattgcattaacagttttcaatgcagcaggtgttttaggtagaattataccagctttcctatcagataaatatggtaattttaatctgataattttaatgtcagctataatgtcattatcagtttggattttatggttaccatttggtaaacatttaggtgcatttatggcatttacaattattttcggatttgcagttgcaggtacacttgcattaacaccattatgtacatcagcaatttcaaaaccaaaagattttggtaaaaggtatggaactgcatattttgttgtttcattttgtaatttgattagtttacctgttggtatggcattaacaaagacaaaaggtggttataactcaatggtagaatttgctggtgcaacatgtactttggctacatgtttcttcatttttagtagatatagagttggtggaatgagaaaaatcaaaatatgagatgttttagggtatttatatttatttatttaattatttagttataggattatatagattaagtcagagtacaaattcttttttataaattaccaataccatcccagccagtactgatactttgagttgatagactttcatctctttgccaaaaatttctatctttaatatcattagtttcattatttttattctttatatcatcaattacaacattacccatattatagataatattatttttatcataatttgtattaattaaattatctaacatcatatttttccaattaccgggtatacaagattctaaatctggattattcataaagataccttcatgttgaaaatcatcagttttaatcaatgcagtatttaatttatttaaaattcttttgaattcctttaattgagaattatttatctcttgaataccatttgctttctttaaatgataaatttctataattgttttagccattttagttttatcattaaaaaatttcttctttttcttaatttcatatgtgctattaattttattatgattatgagttttattctctataccacttaaacctttaatccaattatttattttatcaactaattcatttctttgcttttcctttgtatcatttaattttaatctaattaaattattcatttcatcacgtacaacatttatcaatgaatcatcatcaccttcatcatcataataaccatcaacatcaccatcatcatcaacttcatcatcagatataatatcaaaatcattaatgacataactttccctatttgaaattgtacttaaaatactatctttttcaatttctaaatcatcagttaaattatcactatcaccatgaattgtttcacatttctcattaactgatggaatattatcaaataagacccagtctgaagtttcacctgttaaaaacccagatgaaatcagtgttggaggggaggtgttaatgtggttattttcctttttagtgtcttttgataaggatttaatatttttagatttaacaccactttgaatgatttcatcggtaaataatgtctgtgttaatggttgaatctgttgcattacttataccttgtttatttatcaaactatccagtgataacaagtgaacaagtaatataacaagtttaaacagtgagttaattaagtataaaacggatttctgggggataagaacgggacctttctaagagcgataagattaaaatttcttttttcacggtttttcgatgatgtcattaagtctatatgagctatttactattaagaagaactatgttattatatcatgtaaactgcagatatatagatataaaagatagatataaaagatataaaagatatgaaaataaattaaaattaaattaaattaaaattgaaactaaaattaaaattaaatgcagttttgctattttttaatgaaaaagttttaaacagaaaaggtttagatattttttttatgttttgatagtataaggaaagactttaagatgataataataattattattatttattattattattattaaatttatattgcagtaataaaagttgtttcattataaccataaccagtttcatcaacatcaattttatcatttttaataatttttaaattcatattattactaaattgataaacgtaaggttttgtaccagctacaccactaacaatatttttaacaaattgaggaatttctgccataacatcaactctttcacataaattatctaaattaccattaatttcaactttaattgaattatcctcattatgcatattataagaaattttagttggtacattccaacctgaagtttcatcaattttacaatttaaatgttttgtatcattattcattgttgctaataaaattttaccatctttatttgttacaattgcagcactaacttttgttttattatatgattgaggagttgtaaattccattataacaacagaataattatcagattgataatttaagaaatcccaagttgcagctgcatgatgaggtttcataccttgtaatgccataacaaacattgttaaagaattatttaaattaattttttccctttcaatatattgaatttgatcattttctaattcatctaaattttgaccttcctttaaatcacgtaaaataatttcaccatttgaataacatcttggccaaaaagcgtgtctcattgaaccccaaggattttcaatatcagtaccataataagttgtaccatttttaccaaatttaatactttcaccaatttttttaacaattaaatgaacttcagttaatttattaacacttgaatcaattttatattcattaatattttcaattccattttctttattaagaacaattgaaaaatcatcagctataaaatcagtttcattttcaattttaaaattttcaagttttgttgaagtccaaataaaatctgttggattactttttgggaaaattttaaaagtaaattgagcagttgtatgtaaaccaattatatttgaatgaattaattgaacaaaacctgcattaattgaatcttcaaaatagaaaaccattgtttcaacattggtatgatttggattaacaaattttaaatcatctaaagttaaaggtaaatataatggatcatcagcttttctatcataattaactggatgaattgaatcaggtccatattcaggttctgcagttcctgcaactacagataatccactttgtactaatttccacattatataatgttaatagtaaaataaccaagatcttataataaagtgaaacttaaagtcaaaatttaaaatccaaaatccaaacttaaaaccaggatcattaaatcagaaacagatcaagcccgttaatattattatttagtaaaatgacatgttaggagactatgcttagtaggaaaaattttatttttttacccttcatgttttataaggtgtactgtagagtattacgtaatatttcatatcaccaatctattccagttgttattattattattattagattaagtattaaatattataattattacatacacacttaattaaatcaatcttcatcatcacttaaaggtcgtccaatatcatcttcatattcatcctcttcatcctcttcttcatcaccttcctcatcatcatcatcttcttcatcttcatcttcatcataaattaatgatgcatcaaagaataatgatggatttaatgcacttatatcacatgaagttgcttcaccatctaaaattaattcactcattaataaacctgttgcaggtgcattatttataccccaacatgaatgtccacttgctaaatataaattatcaacatttgtttcaccaattaatggacctgatgatgatggtatatctaaaactggtaaataacatgcttgtcttttcaaaactttaccattttttaaattattacttaatttggaaacatatttaaataattcttcacatttttcagttacaacttcaacatcatcagttgtttcaggaattaaaactgatgaatcaccttcaccacaaacataaacttcatcctttctagcataaatttcaggactaacaaatttatttttatttaattttaattcagtgaaaactgcatatggactaatttcttcaacattttcaggttgaattataattgaatgagctcttaatccactaattggacaatctggtaatatttttgatgtccatggtccaattgataaaataactttatcaccaaataattcaaaacttttatcggttataccttcattttcagctttagcacttgatggatgataaattataccattacaattacctgtttcttcatcaattataatatcatcaattttaccaataactaattcaacacaaccagttgaaatacattgattaagtataaaagttgtaaattgatatggatgaacttgtgcagttgttgattcattacctaattgattccaatcattaataacttgatcattaatccaacttaaattttttggtaaatgatatgataatttatcagcagaattagaattatttgattcaatttcaattgaatttttcttaattgttgttgctctactcattggtttactgccaagatctaaatgcggattattaaggttattagggctattagggctattattattattactattattattgctatctcttttcatttcagttattccattatcaattttatcttcttgaatattatttaatcttgaattagttcgtatactattattactatgattatgattatctttgtcttttatattattatttttatttttatttttaattgaatttaatcttgaatcagatatatcaccttcaacactaatagttgttaaccttctatacccccattcagattcaccattaaattcatttgataaatcttgatgtaattggaaacttaaaggtacaatttgttgaggaaatgcccataaagctaataaaccacctgctttaccacttgcaccacctgcaactcttttactttctaaaatagtaatataatgtttttttggatcaaattttggatgtcttgtaatataaaatgcaatacaaacaccaattataccagctccaacaataatataatgagttttacccttatgtttaccagatggtgaagttgaatatgtaataaattctggttcttcgtcaggaatatttgcagttgtctttgatgatgtcatttaatttaatttaatttaattatttgatggtttaattaatcgcctcttgtatgtatctatgtatttattgatagttataattttccaaatataatccacttgtcaattttaagattaagatgattgtacttgaaaagtatagaagaatataaatataccaatccaatattctccaagacaaattagaaaagatgcattgaataaattctcaattacacatcatagcaaaagtggtctcattcagtataagtttcagaaaaagaatgagaaaggagacagcctgaggaaaggcctatttcccgagaaaatgcgtcgatgcggcggtacgtctcttttagaattggagggtcgatgcgtcgggctttttttatttttttttattttcgtaatacactttcagtacatgaattattataaatcgattatgaagagaaaagatattaaggttaaagattaataatacagactcttttatcaaaagcaccatgtcaggactctcagaagcctttacagagaatgacaatgcaattgctcatcttctaagacaagtagtttatcttttctatcctcatcaatgtattgttataatggaagcactattatttcatcatgtacttttcgaagatgatattacaaaactttgttgtatgcacaggaaagttttccgttctttttgtaatatattagttgaagataaattgatttcaactcatattcaaaaggaagaagctcaacaatataaattatattcaagaacttattattatattcataatattgaagcaatcgatgcaattaaatggaaagttcatacaattgttaaaaaagttaaacaagaaattggtaattttagtgaacctcaaggttatatttgtccaacttgtcatcataaatattcacttttagatgctgcttctcttttaactgacgataaattaaattttgaatgttcaatttgtaatgattatttaattgatgatgatatatctcaagaacagaaaaaaggtcaagaaaaattagagaaaattatgtcattagttgaaccaattattcaatatttgaaaattgttgatgatttaaatattgatgataataatttcgaatcaactttaatgaaatatgtacctgcattctcagattctttagcactttattctattgctaataaagttccaaatagacgtaaaaataataataataaaaatgatgataataataataataataataataataatgatccaacaaagaaagctcaagcaacaattaatgtctcaattactgccgatgatgaagatcttaaacgtgaaagacaaaagagagaagatagaaataaaaaacttagacaaaatgctttaccttcttggcatcaagaatcaactgttggtaaagctgcattaggtcgtttagattttgaaactgaatctcaatttaatgattcagaaactattaattcttcaaataacataaatgaaatgagtgatataaatgatttagttaaaactgatcctgatgcttcaactttacttaatggtagtactacaacaacaacagataatattaatgatgatgcaaaatcatcatttgcaggtgataatataccaccttcattaccttcacttacatctgatacattatcattatctaattcaattacaaattcatcagcaattacaaattcaatacctatttcattaagtggcaactcacaaccgcaatcacaatcacataactttattacaaataatgaaaatacaacatcagaggaattcgatgcattatctgcttattattcacaactgcgtcaacgtcaagctgttgaagaacaggaagaggaagaagaggatgaaattgaacaagaagatattgattatgatgacgatgatgataatttagacgattttaatgataatgataatgataatgaaattattgaaaaagatgttgaaattcaaaatattgattctgtaccattaatcaaaaatgaaaataaatccgaagaaattaaagaagaaattgatgaagatgattttgatcttgatatgtttgaaagtgataatgaataattacttatgattaattatcattaattattaagaaatgacactttgctaatgtatttacataattacgtatgtatgcaacttttatattatatatatttaatttatatatcctttttaccactataaaagtttgattggtttttttacttacgttgttaaccctgttttatcacctacagaaacaattggtatacgactaatacgcatgtacaacgtccactattactaccactattttttttcaaaacctaaaatatattgtagcatcaatatcatacataacatacaacggtacatgactataatgccagaatagaaattttttgagtactatttatatacaacctaaactcccatattttgtaatggaatatcatgtaatggagagtctgaataattacctgaattatctcttgaacttccttcctcgttaatttgaatattatcattattatcattattatcattattattatttgtgtgataattataatcaacatactgtgcatttctttgattattccatggtttataaccatcctcttcatcgtcttcttcattatcatcaaatctatttctatcattattaaaacgtgaatttaaatcagtatatctattacttgaacttgcataactacgagttctagttctagttggattaccttcaaatgtgttaaatcttttaatacctttggtatattgttcagccgatgttccagaaactgtcaaaacattagataatccctttcctaataattttaaaccttttttagcaagttgattccatggcataacaccatttgaaatattctcactaattgttggttcatgattgattggtcttgatgattcagttactgcacgtgaaatacttgggaataaacttgccatttcttcctctgaatcaaatgttctagttcttctcattgtacagtatgcttcaatatcatctcttaagttcaatttctcattggaaagcataatcgctctatcaattgaattaggtaaacctctatgtctacctctaattagtgttgcaacaataactaatttggataactttttaaattcaccacaaaatgaaacattaacatttggatatcctaatgataatccaactgtaccatatgctgaagtaacttcaaacataatttgaaaaattccaaatctcaaatcaccagatttaattcttccaccttctacaatacaaataatgaaaattgctaaaaataaaaaccataaatcaaatgataattgttttcttaaatgggctccaatataattcaatttaccctttttatcatcatcattatcatcattaccatgatatatacccaaagattgttcctcataaacattagttcttctaatagaaattgctaatggtaaaacagatatatacatcataaccaaataactcacttgaatagctggatgtaatgtagctatatcaacaacattaaaacctgcagttcttgtagagaatgcttgatacaaaccagctagaacttgataacctcttggtaaatacgataaaacacttgtaccaaaatctaaaattataaataaaatccaatcaaacatattcaggaaaactaaaactgctgttaaccaccatgtaggacctgatggaaataacattgtaaaacatcttcttggatgatcaagtaaaaaacttaatgagttatgtgtcatggttaatggcttgcaaaataatctcattacccaaataattagtcttagaaaaatcgggaatgcggtattaccaattaaaatgaaaaatcctgaaataatcaaagtatatgcattttgtgcaaatggaatcattgatgcagcagttaatgtatatcctaaatcattgaatgagctcattgcagtgaaaaatgcccaccaagtaggtgaaataccatccgctctgacaacatcgatatattcttgcttattgttaatgtatgcaacaaaaaatataatattcagaatatgaaatccaacataatatgaaattaaaatttttgttaataatttcattgattgatattcaacaccacccaattctgctttctcttcagctgataatgcaataaatttggaattacgtccaattttaggatcccatgaaagataatttgtaggtacatttttcaatccataataatcaatcagttcatcatcacttagttcagaagcattactcattgttctatttttagatttcaaactaaaagttcttccaaaaaagctagctcttctatgattatttggatgtctacgttgattaaatgattcatctccgcttgtttcatctgattcagattcattatttaataataaatcagaatcaccccttccatcaactttattatttgctgcactaatatcaaatggtgaaaatattttttttgaaaattcatgcatagtatgtgaatgttcaagtaatttatgtttttctctactaggcggtacaatattcttatttttttctcctgtttcatcgatttcattatgatttttaccatttgccagatccaaattagattcaccattaatattaaaatcatcatgcagaacattttccagttggcctttcaggaagtttttctcattctcaacattctccataatttctcttgcttttctcttatgtcttttcagtttatgttctttgataaatttctttcttcctaaatttgacttacccttgcgatgtttccttaattctcttgggcttttaatatgtaatgcagggccaaactcaatgtcattagttgaattattcggttctttttgaagggcagaaatagacatatataaatctcttggatccaaatctcttttcttgtttttacgaggtttaggtagctcaccgaatttaatgtttgttctggtaggggactcaggtaaattattatgttcgttattatttccatcttcatggtcatcatcaatctcactatcaatatcactatcataattatcattatgattataatcaccctcatcctcatcttcagtcggttcacttaaatgacttattgcaccaccatcatcgacttcatcattatatcctaatttttgttcttgcttttcatggctgcttgaagtagtagatccatttaaagattgattatgaactttagaattataatctgtgtttaaatcaagttttaagttttgattttgacgttccatactattattatttgagtgatttttcatgttttcaaatcttgccattctactatttaaaccttcagaagcattatgactttcataatttctaccttttctattattattttgtgatgaagtaccagtcattgttcttgcactagtttcagatcttaaatttgcaattgttttgcttctcctcatattatactgttgaattgaactaattttaatattatcaaatcttttctcataccaatacaatcttaaaattgtgaggaaactatgaatgaaaataggtgtagttaacatacaaacgacatacaccgcaatttgttgatataatttcaaattatttaattgttctgtagccaatccaccctgtgtacaactaccagctgcaaaaaccaatgcatcaatataatcaatatttttctcaggataaatgacaactgaacataaaatggtcatgaaaataatataaacataatgagctataataaaattaggtataattcttttcacaattggagataagaaatcttcaatcttataaataacctgacgtatagctgcaaatgtactgtatctgaatttattaaaattttcataagtttcatcaacaactgttgcactacgttttaaacgtttacctatattacttctgtcaaatctattactgtatttcctgtgatcgctatatctatgattatccgtattgtctgtattattattagtattattattattaattttggattctgattcatcacccacgtgatgactcctatccatagttgatccatcaattgaactcgaaccactatgattttccttttcactttcgttatctgaacctttctcatgatccttttgattatgtgttatatgaggaatgaaacgattaattccaggtggtaaatgcaaataattatgtgaagtatctaaaaattcatcactgctatcgttgtcaattcgggtaactatcctttgaggatgtctaattcttgtattatttgcagcatctgatgagttaattgatgactcatttaaccctgtgtcatctaccatcacatgaggtatatcacttcgcagtggatcaaccatatctaaactaaagctctatccaagtcatcaaacagtatacctttctcaattcatgctctgagtttattatatcaacatgcagcctctgaaaaaaatttaaaaaacaattgaaatttccgagacgtttttccacactgaaatttccgaggttggtttccaatgattagcatgattattatcattacaatttcaatgattatgattaatagaactggaagtagagttggaaatggaatacaatagcttgtttaaatatacaacactctataatggatcaaaatagacctattctgagccgtgtggcaacatctgcaccagatgcatccactgcaattgatagatcaatcacagatttcccagttgctaccccaattgatgaagataactatttcagatttcataaaccacctccatatctctcacaaataagtaatgatgttgctagttttatcaactataatcatcaaaaacagaggaaagtagtattagttacttcgggtggtacaactgtcccacttgaaaataatactgttagatttattgataattttagtgcaggtacaagaggtgcaacatcagcggaatatttccttgaaaatggttattcagtaatattcctacatagagaattttcattactgccatattcaagacatttcagtcatacaactaattgcttattagatcatttaaaattttctaataatggtaataatgttgaagttgatgatgatttacaaaaagatttagtctcagtattgaagaaatatcaacaagttaaaaatgaaaatagattgttattagtacctttcacaaccgttcatcaatatttattcactttaaaacttattgcacaagaattatcagtaattggatcagatgctttattctatttagctgctgcagtctctgatttctttttacctagttcaagaataccagaacataaaattcaaagtcatgatcatggtggtaaattagttgttgatttagaacctgtaccgaaatttttgagaagattggttgattcatgggcaccaattgcaatgatcgttagttttaaattagaaactgatagttcaattttaattaaaaaggcaacaactgcattagagagatataatcatcaattggttattggtaatttattacaaacaaggaaaacagaagttgtctttgttactccaaatgataatgaatggattaaattatctgaaaaagatatcgaaaatcaacttgaaattgaatctttgattataccaaaaattgttactttacataaagaatggatcaagagccgtgatgatcttgttaaataatattatatctatatctataatagtctgtttttctaatcttatttattcacatttttaacttttataagaaagaaattcctataccccactgtaatccacgacgtatagaatcattagcattagcagttacaggaacgacccaattcaattcaaatgctgccattggatgtgcaaatgaaataccaaatcctgtacttatacaattatttttgaaaacatttgatgcagcattagcatttaatattgaaaaattatttgttaatttaccaatatttgtaaataaatgaaatttaaaatttgaatcactataatatggtatattagagaataaattaagtccaattgcatggaaataattaccacctaaactcatattcatttgctttggtcccatacctgaaattaaccaccctttcatatcatttgcaccacccaattgaaatttatccatcggatgaactaaatcattatataacggatgaattaaaccagttttaaagttcagattaagtattaatgatttattgattctataacccttcgaataatcaaatgatgttttgacaaatttatttttagtgaataatgataattcatttgataatcttaaataataacctttctcaaaaatatattgtttgtctctcgtatctttaaaaattgaatatgtaatcgaagatttataattataacctgcattgaaaagaaagaaatttgtcattaatgaattatttctaatagaggaagcaacagatgatgatggacttttcaaactgatagatcttaataagttttcaattgatatttcatgatttaatttattctccattggtaaattatttgttgaaaatttcagtgttaaaccttcaatagattgattatgatatgatgtataatcaattgttctcattgaatggaataagattgaattaaatttataattagctgaattaaatattggacttgaatagtttactatgtattgtgatttacttgatttcattttaaattcattagatgataaatttgtatctaaatccaaagattcaccacctccaaatatattcttccattgtaatttaacataaccatcaccttcaccattaccaacatttgtaccaattttaaggaaaaatttctttactggaataacttgcaaatttacaaaaatattcagtaaatcaggattaaagtaattatatggttgattttcaggtactccaatttgacaacccatatttgaaattgaatcagtctttaaaagattgaaatttacatcatcaatccttttcaatagttgagagaatgtaagtgatctaccgttatcattaagttgtgatattattggatcaagctgtgcttttaaaaaggagtttctatatttaccgtccgtaccaagtatgttaaagtttgttatatttacaggtctagattgattatcttgaacaacttgtttaaccgtattaaaattatattgatctagtatattttgtcttttaagttcttcttcctgttgaaatgaaagtttattctcattaggagagaacatagtctcctctaggctactatcaggaccgttcatactgattattgcagtgtctcaagaaagaaactgaattaacaattcaaccatgttaaagtgaaatttgtacattaaggcatgttagtatctcatgcgcttatgtaagaacgggtatatgtactttcattaacattaacattaagatatatatatataaaagatatagatataatatactagtctaaactaaaagagatcaacccatgtaagccatttaaaccatttaggttctactaataaacattttgcatcagcaactgcatcaccattcaatgatttaatatcaccattaatcttaactttcctacctcttgcatcctctactttagccgttagtataaatgtagaattcggttgaagtttaccatcaaaattaacattaagatttgctgtaacacctctcttatttggtaatttatcaaatccacagaaacatagtgattcatctaataatgtaagtactataccattatggattttcccatcaaaccctacaatatcagcatttgcagttttaccgaaaagtacaagttcaccctcctttctgtcaattaacactattggatcatttaaatttagtaatcctcttgatacttgattatatttatgtgcagctggtattaatttttccatatcaaataaaacataatttttacttgtatcattaatatatttttgaaatacggaagaatctttaaaatgttcatatgattgtaattttgcacattgttcactaattgaaaggttgctcttgaatgatttatgctgtaccaattctctaggttttgtccaaataggtgaatcaggccatggacgagcaaatagagccaaacccaatccaaatgaggtaaccaccaccgtcccctttgcaaatgtacccaatattcctctcactacacccattatctttcaaatcagtatactttctaaagaacatttaactaatataacagcattaatctatatacatttcactaagaaatgatatttaatttgacatgtgacttacccggatttaatcagtcgcagagacgtgtttacaaaatttcaatttctatagcaatttacatctaataacattaacatcaatcttgaattgtctttgtgattgtacagtttaattgtccaataatcacactgtccataaggtaataatgtcagaacaagggtcaggacaggaacaaatagaaaaagtaaaggaagaatctagtgaagctttaaaagtggaggattctataaaattagaagataccgtcaaagaaaccatagtggagaatgatgacgtgcaaaagaatactcccgttgttgaacaaaaggatgaatcaccatccaaaaatccagatgatgaaggtagtagtgaattggagaaaaaggaaattgaacctccaattgatgaaactgatgatatggattataaagactttaatgaaaacgatgatggtgacgcggatgatgtcgatggtgatgttgacatggatgatactagtgatgtcaatgataatggtgataatataactaatgcaattggcaaattaaagaaaatgaaaaggaaagaaccaattgataataaacaagaaccaacatttgttgaatcaaatcttgaaagacagactcatacaattgttttaccatcatattcttcatggtttgatttgaataaagttcaccaaattgaaattgaatctgtttctgaattctttcaagggataaataaaaataaaagtcctgaaatttatatgaaatacagaaattttatgataaattcttatagaataaatccaaactcatatttatcttttactgcagttcgaagaaatttaattggtgatgctggtgctttattacgtatacataagtttttaaataaatgggggttaataaattatcaagttaatccagaaacaaaaccaaaacagatagaacctccttttactggtgattttgtagtagattttgataccccaagaggtatgttcccatttgaaagttataaacctccaactaattttcctgatatatccaatgttaaagaaattttagctcctaaaaaaggatttgatattgagacaactaataataatactcaagttgaaccatcaaataaaagacgaaaaattataaaacctgatattgataatggttggagtgaagatgcattacaaagattaattgatggtgtatctaaatttaaaaatgactggtataaaattgcagattatactggaaataataaaactccagatgaatgtattattagatttttacaattaccaattgaagacaaattcctagaagaaaacaaagacctattaggtcctttgaagtatgttcctaatttatcattctccccaagggacaatccaattatgtcaactcttgcattcttagtgaacattgttgattcagatgttgcagttgcagcatcaaatagagcaattgatgttgttaataaaaatatagaaagtaaattaaatggttcacataaacaaaaagctgaggaaactgtaagttcaaatcaaaaaaatgaaactagtatagaaaaagataccaagaatgatacacaggaaggttttgaaaaaacgattgaacaagaaaaacctgctttgaataacggtaaagctgataatatagtttcatccgttaaagaagaggaaaatcaaaataccgaaaccaataatgtagcaattgaagaggaaaagaaagaaaatggttcagcaggggatggtaaatctgaaactcccgcagttgagattgggaataccaccgataataaaggtaatgaaatagatacaaatacagatttgactacaaaagactcagataatgataatactaagacacaagttaacgaaaccaatgtatgtgatgataatgataaagaagaatattcaagagatccattggttgatattaaagatgctgctgttaatgcttttggtatattaggtgctagatcacatttatttgccacatttgaagagagagaaatgcataagtcattagtaaatattattcaacaccaattgaaaatagtagacatgaaagtctcgaagctaaactcattggagaaagagtttgaaattcaaaagaaactattggaaaagaaatcaattgaactattagaggaaaaattgagtatttttaagtacaataatgccgcaacttccaaacttcttcaagcaatttcaattattgaatcaacatcagattacagtcaattaaacgtcaataaaattgaagagctcatatcacaatccaaaaatatactttataaacctccaagaaaacaactcaatataattgaagaaaatgaagattcaacatcaacagaagaatccaatgaatcaataaaacctatcagttttgaagctcctatgttgtataggtactggagtggttagttttatttgtatagtatgcatgtatcaatatacttgtttaatgtattaaattcgtcctttacagtgtaaacggtataggtatattttctaacggaatatcttgtgttaagataaataatatgtacaaatgttttatttacaaaaacttatttaattgttctttcttggttttattactttcactatcagtgccatgtattgcatcattctcattaaactcaattttctttatcttactgaatgcctctcttaacttctttttatctaatccatcaacaccttccacaatgacaggacttaattgaaaaacatcaacaaaacgttcattccaactcttcatagcatctcttgcttcctctgtcgttattctaccttcttcagcatccttaataagtttattcaatactctaaacttcttttcaaaattttcatctaattcttctttcaaattcttttctctcataatatttaatgttgaactacctaataaagtaactaggaataattgccagaatgtcattcgaagtgatctcttcttcattgcctttttgatttctgccttttcatcaagtgttgcctctggtattacaatgtcttcaacatctttagccttcatatcattctctgttaatggaattggttgttctcccatatcagccatatatttctcggatggcctaggtaattccttgtagctcgatatactactagtaaatgatcttcttaaaagaccattattaactgtccaacgtctcatcatcatcatcatcatatcccccgaatactactgtttttgatagaatataccctttaatattagatctatgtaaagaaagttaatcagcctggtatcatgaaaaataaagctttactgaaatttgtcaaatttctcacggtgatttcttcatgaattaattttagtggagagtctacacttctgaggagacttctttttagaaggaattttatcataggtaaaccagacagattatactagatgtcaatatgttataaataatataaaataaacaataaaaaataacttaaagtatttttaaaaagcatcattgagttgatgttaatggacagtaagttgtgataactttggtaacaccgtcagaaacaatagttgaagtagtttgataggatttcacagtaactggctcatatgatatagatttatgggttaaaatagtttgggtaacaccattagagatactagtaattgtttgttttaattcggggatactagtttctgcacaataatcgtaaaaacaagcagttgttggaatataagtatatgcatcacttgaggcaggatctaattgatagatagtaacagcatattctgctaataatggatttggacccataactaaaactgcaaatgaaactggaacaacaccatattttggtaatgctaattgaggtgttaaaaatctgataaatttaccatcatctgcattttttgataatttaccataaaactgatatggtgtatcgtcacccatgtcaagatctgaagtatcaaatggttcacattccgtgtttgatgaacattggtagaagttactaccggaatcactccatgcaaatgtttcgggataattaagttgtaatgttgcaatatagctaaatgatggaaaatttgctggaacatcaatctgaattctgttatctggggtaacagagatctcaaaatcaacacttgcttgtgtaaatggaacgataattgcagtaagtgcagataatgtggtggtaagtttgttaaataacattcgtgtttgcttggtcttcttaatgaattaacatgataactattcaaagtggattgtttatggtttatatagatatcaattcctgctttatatcacattttttgattatttccattccatgtgatagtttcagtatcaatctgaaagcagctagatgagttacaaatcttgattatttatcaaaaaattgcttgattgggaatgcaaaggaattggatgattacatgtcaaggagtgataacacgatttttcatgtttcaaacagccatacattgctgcatcatataactgaaacctataaatttacctgtatcaattgctaaaacaggaattctgtgattgatcttcactttgaaatttgaaaaactaccttcatggacaataaaaaatatagtttatctttaatttatcattttttttaaatatattatggtgttagatagtgatagcaatctaatttaaagtacaaaaaatattacctaaatgtatatagtataaacaactctgaatatgaaacatcccatataactaattttcttcatcactcagttgaaatctggatggatcaacatcagtgatttcatcgtcttccgtattgtctctatatccagaaggggtatttacattatcatgtgttgcgaaatcatcaaaatcatcatcacgattcgcattgaaatctgattcattccctaagaaatcatcaatttctcttgcatcgtcatcattaagatcaccaaatagtgaatgatcatcatcaaccatatcattgaaaaaagcaccaattgatccagtattttgatattctgatcctgtgtttctatctaaaatggtgctgaacatatttgatgtgacgaaccaacccttagctaacatatggaaactaaaaacaccaaatctaacaatatgattaacaaatttatcaattcgattttcttcaaccaattgtaaattatcaccatcatcaagatgaatttcacccaatcttgtaaaaccaccatttctacgaattcctctttcatagaccaaaactaatgttactgcaaatattaagaatggaataaaaataacccaaaacataacccatccagttaatttggaatgttcagatttactacccggacatggatgtctgtctattttgtctaaaagtaaaccatcctcgcatgtggataatgcaagttttctatatccagtaggttcccaccattcatcaacattctcctttgaacatacttctatagggttgacaggagttaaaccctttaccaatttacaagtaccatcaattgctaactgataattgtaatcacattcataatcttctcttgtacatttacagttattgacaatgactgaacctaattggattggtgatttaccaacaaaacatttactatcagcctttttacgaaggtaacttttttcatgaccaaataaacaactgtctttcaaatttggatgttttggggtgaagaattcaaaatcactatccagtatcctttccttttctgatggtaaattacattgccttggataaatagctgtaaaatctaaagtgaaaatgttgtttaaattcttattgtctttagtaatcaaaatgaactttaatgaatcatcagatgggacagtagcaatatcttcaactaagtaagttgtatcatcagcagtaaattgtttttctacccaactgttaccatagtctaatgaatatttgaatttattagtttgcttatgcgtctcaacaataactaaaatagaaccatgatcaccaaattcccagatataattaccctttgcaatttcaacccatgtaataccagcatcctttgtgaaaaataatgataagttttcatcttcaattggtaataaactggtaccgacattacccaaaccaaacattaaaccaacagcggatccagaggagaaagaatcacgcataggatctaatctttctgtgaaagaatgtaaatgtaaactgcatcctttacaattgatattgttaccattagaatctttactaggcggtggtaacaatgaccaagttgcaccatcattatgtgaaatgtgagaaacaagtttcttatcatctttctcaattggattaatcaagacgttagtaatgatcaatccttccaagttttgtgaatattcaaaatcgacaaatgcttctctatttctattaacaaaatctgataatgtggtcaatagagtaccattgtaattggctttcaatagtgaaccatattcatgattaggggaatcattgacagtcagatgtaagaaaagttcctttgaattaacatctaaaatagtgtaagcagtttgagcatttaagttagtttcagctgggaacttcatttcagcataattttggccatcaacagtaacgtaagcaattaatgattgatcatcattattatcattcaatgtagcaacaactaaatattgatcaccggtcatagcgaaacctataattttttcaaaatgaacaattggctctgaattgaaagaatcggaagatgaaattaatctatagtatggttgatctggaactttttgtgaacaaataatttgcaatgggttgacttcactggataattcagcattgaaaatactttcagcaaaaacacaattaacaacatctgatattaaatcgttgaatgtttcaccattatcttccgtgacagatgcatatgatttacaattgttggcagaatcgcaatcaacgtttgaaaccaagatgtatgtatcccttgatgatttatcaaaattcatactatatgaactataaccctttgaaacatgtggtaattttgcttctttaatgagttttcctctattagtagatgtaaaaatttcaccgctatcagatatcaaataaaatgaatcaggaaagtatggattagtaaaaatgtaaataaagttttcatcagctaataagttgaaactcagagagtcaaatgaaatgtatgcctttcttgaagcagtcaggacaattagagtttcatcttggagttctgaactagttgcattttgttcaagatattgatagtatagaatgttttcaccaaatgaattaaattcaatactgaccttactatcatccgatagatctatatctttacatttcaaaacataatcatcaacaggaggcttaaaaccaccttggcaaatattaccttctgggattatggtctttgacaatttcatttcttttaagtttggatcatcaatacaataagtttgtaatacattcaaatctggttgacactctttattttcatcaagattaaaaccaaaattacattcttcatcttcctttgtacaagcacatggtgtttcgattacttcaatatccctgaaatttctatttacaaaacaatcagcatttgcctttcttctactgaatttctctgaatgtccaaaaatacagctttgttcatttgtcacaggattaaccctagctaaccattcttccatatcattatctgagcaagttctatcataagtttcagaaaaatcaattgtgtataaaatggaattttgctcaggctgatcgggattttctttccaaataccatttaaaataaaaactttatcagtgttatctatattattaacaaaaaacaaaggaataaaatgattgtctaatttaaattcattccaactttcaccttgatctaaggaatatgaaaaggaatcagtagcgtgttctaatttacctgttaaaaagtactccaaatcaacatcagctgtaactaaaatattaccaatatcaccaaaagcaaaaactgtaggcttatcattaatttttttccaagtaacacccccatctcttgaaagaaaagttttcagattatcaactgaatgatcaagatatttaccaacattacctacacctaataaaataccaggggtactacctgttgataaaagaccatcaccacgacgttgtgtaacccaagcaatatgtaatgaacaatcatcatcatttaagcaatttggagagtctgtgatatttaaatattgccaatttttaccgtcatctaaagtaatcattgattttgagtcaggtaattgcatattattgtaaacaacattatgtgatgcaatccaaacaccatccaatgtctctactttggatattaaagacataccgaagagattagaaaaaacatcatcgaataattttttaaaatagacaccattagagtcagatttataaactgaagatgaagcttcaacattaagagatggtgattttgacttatgattgtaaactgagatataaaggttattctgtggtgagtctaaaatactgaacatataacctctactattaccttcttggccatcaagttttgccttttcaaagtgtataccatcgattgaagtgtataatagtacggaatgtctcattcttgaatttgtggttactatcacagtgataaatgaattgaccacttttgttgataaaatatgagcattaccacccatggaagatattgataattctttatgtgatttaaagaaatcatcagtggatataagttgatcagaattaatagcaccaaaataatttttttgatgtgttatacaaataattgtttcatccttagcatttttaaaatagggattggattttaaaaaattacaattaccagtatttggtaatggcatttcaacaagattcgattttaaattatcagttgaatagaatgtcttttgaaataagtgatgattttctgtatcaataatttcatattcgaataaccaataattcgtgttagcaaaattgatttgagctgtagcagaaacaaccacatttttagtatccgatgtagttatatcaacatcaaaatgattccaattggatccactatcagttgtataaaatgttctacctgttacagtgaatacaacagcaaaagttttgaaatcttgaaattcctgtaataaaacaatatctaaatcattaccgctatcatccttaaaaggcaattgttcccaatcagcaccgttgtttttagatagatatatggatgaagatgaacgtaacataacagtatttgaatcattaaattgtaagatattatgaataaatggaaatttggagatagttatctttggaggggttatatccgctgtcaatgctgggactatccaacatatcaagcaaataaatgttgatacaagctgcaatatacgcatgattgtgtgtgttattaacagaatgtaaagctttgataatcaagtaacataaatctcggtattatttagccatctcaacaggatggtaatgtcatttaatctttaattatagtggtgattattataatagtgagcacgtcgatgcgtctgattcttgtattatatagttgcagttcatgttcgtacaacttgtatctgaatgctatctaatagtagtataatgatatatgtattacagtactatacatgtcatcatctattcatcgattgaaaacagtgatacaaactaattgatacaacctatgctaaaggtataaaaagaagaaaatatttatggcggctcatcagtttagtttattaccttcttcttcttcttcttcttcttcttttgcttctcattatactataccgtatatactaccagcaatccattttcattaccagtatattatcaatatataactgatagaatggtacttcaatttcatttatctttaagagggtacataattttaagaataatacttcaattgattagtacagagagataagcacttgacgccaataaatgtatttcactagttgctaggccagaaagaaaaaggcttgtatcagaacttataatctttaaaattgcttcgtttggtgaccatgtaaggatatcagagtctacaacagctgcaagacccatagttccatgtgctgcagtcaatgaagtctgtaatttcaacaataattcagaagcagagtctgtagagtgccccagacgcaaatagaatgacattatcttttaaagagttcaatgatttaatgaaagaacaacttaaagttaattaatgttaagaaaagtgaaatttttttactgtggaagattacgtaataatttgccggtgtttgcaataatataattttatacctgctatatgactgatgtgaaatttcaattgtattctgttgattataaacacaatcttttagttgtttacattgctatatcaccagacattccgcaatggccgacacatctaacatggattctgaagtgccatctacaccagctacaccttctttatctgcagagtctgttccaagtactacagcaactcaatccgttcctgcatccgctcaagcttctggaataacaacatccgctgcatctacaactgcaaccgcaactgcaaccgcaactgcaacttctggtggtagagatcattctaaaactgttatttatgtttcaggcatcccttcatcaattgctgaacctgaagcgcatgatcattttgtctcaacttccccatctactccaattaaatcatttaaaattcttcatgataaaaacagacctggtttcttatatgcatttgtcgaattttcaaaccctgaagatgccgcaactgctttaccattattcactaatacaacattaggtggatttactctcaatgtctcaatggctttccatactcaacaatattcctcttctaacaattcaaatggtgaagatggttcaaattcagatagtggtaatcaatcacctgttttcaatcttttcattggtgatctatccctggaaatcaatgatgattctttaaactccgctttttcatcattcccatctctaattcacgctaatgttatgtgggatatgaaaacaggtagatctagaggttacggttttgtatcatttagtgatcgccttgatgctgaaaatgccttaaataaaatgaatggtattactttaggtgacagacctattagattaaattgggcatcacataaggaaaagaatcgatcaaacaatcattcaaataattttggctctttcaatcaaaataatagccaatacaacaatcaatttaacaataatcgtttcaataatcaatttaataacaatggtaacaataatagcaataatggtatgaataataataataataataataataataattacaaccaatataataagttaaatacccctgtcatgaacggacaatctccacttcaatctcctaataattcatttgatatcgttgttagacagactcctaattggctttccgttgtctatttgggtaatttatcagaatacacttctcaaaacgatttgataccattattacaaaattttggatttatcgttaacttcaaacttatcagtgaaaagaactgtgcatttgttacctatgatactcacgaacgtgccgcacttgcaattgttcaattgtcgggattatcaattaatggaagaccattaaaatgtggatggggtaaatcaaacagaaattttgttaaccgtaataaccaacaattgccaaaccaaaatcaaaaccaaccacaatttcaacaacaacaacaacaaaatcatcaccaacaacaagcttcacaacaacaacagcaacaacaacaagccccacaacctcaagcaattcaacaatttacccaaccatttaatcaatttaatcaacaattccctcaagcattcaatcagtcctttaaccaaccatttgctcaatccaacatgcaagatctttaattgatttttaacattaaaatacaagaaaacgtttatttttcatctgcattatttgctaatagatttatttcgtacaatacatgttttgtttcctttaattatttatcttcattattcaacatttattttttattatcatttattttcaattatatatttctatatcatttatctacacattttatatatttattcttatttatttaatttaataacgtaaattgatttcatttttttgtaggatattgatcaaaatctatgctctattgtaatgttaatgttacgcgtaaagttatgcatgatttcgatgaattttgatttgaattcttaattccatgtcaaattggtatcaatacttcttttctttggcaaagatgagtggatacaatgatgttgggttctcaagaaatcatttcacccctcattatagcactccttacaaagtcgagcgtgttaccatccatttgaaagaattaaataccactgcaacaatatatccaatttttaacataaattcaattccatcaaatttattgaagtttttgcatcaagaatataatgatgaagtgaatagaggtgataccttaccattctttgatcaattgtcactggaagaatttcaaaattattggtgtgccaattttatagcaataatgtgtattggtgatgaacccactttaaatgctgatgaagaatttactactaatgattgggcaaagaattgtttgggtacgtttttcattaaatcagcttacccaggtagatgtgctcatatatgtaccaccaactttttagtgaatgctggtattagaagacatcgaataggattttacctatgtgaatgtttcctaagatgggcaccgattttaggatacagccggtgtattattgaattagttttcgaaacaaacataggagctaaaaaattacttgagaaatgtggatttaacaaggtagggaagatcaatgcttgtgcaatcttaaaatcaacaaaagatttgctgataaattcattgatttatactaaagatttaccgattataaacgacgatttgaatgtttccaaacatgcaaatattttagtttatttattatctgggaaatatccagaaaattctactagagatgatcgaagtcgattaagagcattggcttatcactacaatgttgtggataataaattgttcttgaaagataaacaggttatatttgaccctaatgatcaaataagtataacaaagaagatacacgaagaaaaccatatgggtattaaccgaactacgaagaaactatcgagtagttactactggagtaaaataaaacaaacagttaagaaggttgttgatgaatgtgaagtttgtaaaaaggacaaatcttcagaatctgcaaatcaaatcccacagaataatacttctatcaccaaccatgataatgataataataacaccactactagagataatacaattgctactaataatgaaattactcaaaataatagtaacaaacgtcaaaaagttaactctaatcaatttgacataccaatgctatccaatcaatggaatcaatcaccagaaaatgctaaaagtgcaaccagaatggataccatgagaatagaaacaccagatgatttgttaagacagtcagaaactgccattatgaatttaatcaatatcaacaatagccaatcatcagaattacaacctcgtgcaaataaaactccaaatgatgatacaaccgatcttgcttcaatgttaaattattataactctacaaatccttcacaattaccttcatcgtcacagaaaagaacacgaaatgaatttgagaaaaacagctatagcaataatctattttataatcaatttcaaatggtacaagatgatgaagaggatgatggtgattacaatggcgaagatgatgatgacgaagaggatgatgaagatgacgatgacgacgaggacgatcaagcagaagaagttcccgaagacgaatctatgttaagctaatatacatataataaacattctatttaaaagaagagttgattagattatcaaactttaattcaccctcaaaaattgccattactatgacatcccatttaacaataacataatttacgtccatatcaacacatttggcgataaagtgatcttgtaatttcgtttcattttcattgctaattaaaatagctacttctttacttccactgatttctttttcagtattaacagtcatggttttactattttctttaaaattactgaaagatttgcatccaaatgattttaaaattagctttaaagtatcaaagccaccggctaaccccgatgataaattgaatgaataacctttgaataaacttgatttactcttcttcatcaatttcattgcttcaaattttgtaatatttttatgaaaaatatttttaggttttatatctttttcataatcaataccattccagatatcatatctttctactttaggtgcaattgcttcaaattcactcgtacttttagtgctatctaaggttccaagaacatcattcaaaaatatcggttcaagaaaatactcaggatcaaatgataaggatgtcagaaatttctgagtacgtagtaaacttggtgctataatacaatttaggttcttatttgcattttcaatgattgtaataccaacttttttcaattctctcttatcgccagctgacaatgatccatcaaacccagttacgatagctgtgatgttatatggttttccattactctttttaggggctggatccgcagcttttttgctatttgatttggtagcatcttcgttagcttcaataacttcaatggtatccgtttttgatttggtcttaaaggaagactttggttttttggtcactagtatggtatcttcttctacttgacgtttctttggattggcttttggtgtactcttgagtttcttctttggttctacttcttctcctatttcttccgttttctcttctgtacttattttatcatctggtatttcccaaacttcatcggctgtttgtttttcagtatctgtaagtgcaattttttcgacttctggagatgtttccttcttctctgttccaatttcaactggtgtgatagtctctattgggtcgactattggggtgatcgcttttttggtggttttgttggtttctgagttcacaggtttgactttttcagggtttgccttagaatctacatcttttgaaatctgtgttgtcacattttctttcttaccctttgaatctgtggttttagtttcgtcaactttttcctttacggctaagttctcatcgttgttagagttttcaccaaatgttcctagaaattcaacatctccgataattcttatattttcttcagttcttggtaaattactgtagaatgaaacgtccattttcttccaattaacgaagcaatcttcaacccagagatgatttactatattcacattccattttttggaaaaatcatactttttaccaactttcttggatgcaattaaatgagtgtttgttgatttcaaagttttggtaaatttgcttcccattctaagaagtaactcttcaatatataatctcgcatcaccggtataattagatattgctacaattgcttcttccatctctttgtttttcaattttgggacaggatgaaatagcaaggagtttggaagatcatcacttttgtaaaaaaacaaattaaacaaaaagtcgaatgttctctgtttaattttagtatgtttttctaaaaaccttgataacacaattgtctcaaattcaaatgagttatctccagttttgatccaacttaaacattcgaccattgatgaagatatatgcagatttttagaaaattcaaaattaaatttaggtagatattgatcagcaggatcagataaaatattattacgcttgatatcgtctgtaacttcgtagactttttcaggaagtaacttaccagcacgcaaacaatcaaaaacccagtctggtctcactatatgaatatgtgttccattcacattaactttgttaaatgcattgaccagcctaacactatcagtatctgatttatttgtcaccaaatgtgtcagagatttcttcaaatcggcaatataactaccaccaaaaacagtaacagcaactttaacaatttcaaaatcatcttcattttctagatcttgagagctaatagtgaaatctttaaagatatgtcttggatctggtgagaatggtctaattggcacgacgtgtttattctttataaccgttcgtagccataatttggaaacaactggaatcattaattttctagttataacttcatattgtggaaattcaattctatctgaaatcacatgtgtaaattgtgaaagtttttgaggactcaattcgttgatttgttcataatcgaatatctggaatacttcatcaatgtttaaacttataagtgaatcaaaagctgttttcaaatcggaataagacttttccgttccaggaccttcatttggatgttttactaccaatagatttatatcttccagtatcgggaagctgggcattgtgttgttacagattgttcagtaatcagagaaacacgaactggaatgaagggtgtataaaaacaaaaatttgaaattccgcctaagtaaacaaattttaaataattttttaattgttttacttgaaatttcctttcttctcccggagacaacatattattggtagaaactctcaccaaaaagaatgtggaataacagtaaacgacagtttgaagaggaaaatgacgatgataatgatattgatgatggttcaatattaggaaatgaaaaaaagaaacagtttacagcatctagtttactaaaatctgcatatgagacaagtcaaaaccaacttcaagtaactgattataaaatagcagatctagaagaacttctgttttttcagcgacgtaaacgtactgaatatgaaaatgctttacgacgtaatagattcaattatggacaatggatgcgttatgcccaatttgaaattgatcaaaaagatttaaaaagagctagatcagtctttgaacgtgcattggaagtcgattataaaaatgttgcaatgtgggtacgttatatacaatctgaaatcaaaagcaagaatatcaatcatgcaagaaatttacttgaaagagctaccaaacttttacctcgtattgataagttgtggtatatgtatttaacaattgaagaatctataggaaatgtcatagcagtgagtgaaatttatgaaaagtggttacaatggaaaccaattaaggatgtttggtttcactatgttgaatttttagaacgatataaagagtatagtaaggagagattgttatttgaaaagttagtggtagtgtacaatgattatgattcatggctaagatgggtggaatttgagaaaaaatacggcgactatatcaatgttttgaatgtttataaactatgtgtgaactctctatatgagaaacgaaaattatgtttcaagtttttgatatcatggataaagtatgaattttataacaaaaaatacgaaaaggtgaaaaaactttatgaatttggatttcagtgtcttgctcctgaagaaaataaacttctacaaaagtttcaagttgattttgaaaaacagtatggtgtaaatagtgaaaatatcgaaagcttggttttgacaaaacgtaaactcaaatacgaagaacaattacaatctaatccttcagattatgagacatggtggacttatctcaacttattactagactctgaacttgaaatttcaaaagaagatatagaaaaatcttttgaatctgcaatatctgttatacctgattctaattttttttcaaataactggaccacatattggtacctgaactataggtttgcattatggctggaatttgacaacaagaacattgaagcagctactcttatctatgaaaattttaagagaattgtaccgcattcagtattcaccattgttgatttctggtacaagtattctgaatttaaactgagaaattttggattggatgaaatgcgtatgatattaggacagagtattggacttacatcaaacgaggaaattatgctatactatattaatatggagattaaacttaaatattttgaacgagctagaaaattgtataataaattgattgaagttcactctagtaattggaaacattggttaacatattttgaatttgaggattcattgggtaatgatgatagaagctatagtatagttgatgttgcaatcttcaacgagtttttaaataataaaagtaaaataaaattgataaattctgttatgaacaaattaattgaaggatacaatttcacgttggccaagaaactttcagattataagattgaacttactgaatattcaaatgtgaattacataattcaaaggtgtctattagaactacgtataccaagtgaagatcaaattacaaagattgaaaaggaagaaataacagagatagacattaacgacaatattaaaaataatactagggatcaatactcaaagtacatatcactaatgaaagataagggtaaagttcaaaatagaattgttcttttagaatcattgaagaattttgaagaaaaacacggtaatgctgaatcaatcaaggctgtacagatgagattaccgaagatgattcgtaaatttaaagaagaggaaagtggacttaaagaggaatatatcgagtatgtatttcctgatgatgaaagagagattgaagagcaaattgatgattttaagaatgattttattactgcattgggagaagatgatgatgacgaaaatgatggagaaggtgaaagcaaggctgaaatagatgacgaggagaacgatgatgaaaatgatgacgaggttagtgaagatgatgttgatgataatgaatctaaaaaaaagtcattcaaatccagatttgagtctgacactgaagaggaagaggaagaaggagttggagaagaaacacaaccactaaaaaaaagtttttccagcagatttgaagaatagacattaattttatagaaataaatacataacataatacatacaatcattaattaatcataattttggtttttccaacaatttattacgcaaaacattagggtaagcatcatatgtattaaagttacccatatgccaaaatccaccatctattatcataacagtaccagtaatccattctgctgcatcactaaatagaaataccgttgcatttgcaatatcacttgttctaccaactctttgtaatggtattttagattcgaaattttccttattaggtactaatttgttaaaaccttcagtaccaccaattggaccaggagcaatacagttacaacgaacaccaattggaccaaactcaacggctaatgcattagataaagcgtcaattcctgccttagcagctccaacatgactttggaacggtacaccgtaataatgaagagttgcagaaacaaaaattacacttcccttattcttaattaattgagggtaacaagctttaactatattgaaagagcctaataaatcaatatcaactactgttttgaaagcgttagcagacatatgattaaagtctgacataaaattaccagctgcaccacaaataacataatcaatcttacctaatttttctacagttttgtcagcaactgataccattgaatcaatgcttcgaacatcacaaccacctaatcctattacttttgcatttttattacctatcttgcctaacaatttgacaacttcatcgacttgtttctgatctctgcctataatacttactgaacacccaagcttcattaatgcagcagcctgttgcctacatattgttcctgacccaccagttatcaaacacactttcccatcaaaaatcccttccttccacacgttattgtaattataattttccattgttaattgattatgatacaagaataaaaaacgaaccaatactgaacaacgtaccctgaacaaacagacacaacaccatccttttataccaccaaaccgtgtttttaatgtatgacataaaatcggagttgatgaaaatattttagccgagccccgcatattgatttttctatcatcgattattcccacattttatcacactatgtagccctcttcttgggctcagagatgagtggtggtgtatccgtatcatccagtacgtcttctataggtctcttctgtatcttggattcttcactttcattgccattgccattaccggtattatgtgatataacaactgtatcatcaccaatatcgtatgaatctctattctgaataacatctatcaaactcataccaacttccgtatcagctaatgtatctttaaaattctcaataaagtattctgcaataagtttcatattcttttcatcaacttcatcgtttatcttttctactatattttgtagaagaccttcacattgtgaacttattaaattgtctatatctttcagtgattgtaaaagtttgaaaaatccattaaatatatcattttctattatgtaatgagtgtaaaaatcatcatttgataaaacaacacttttcaaacatttaattgagtttagttgtagtttacgcttaaactttctatctaaatttaatattattctattaactgattttagtaaatgattctctaaaatgaaggaccgactgtatattggatcgtgagttttagaaataaaatcaagtaaactgataatattttctaatataaatgattgattccaatcaattttttcagcttcagtttcgttatttatgttaattaatggactaaacagtttctttgctggatcctcataaaacttaaccaaaaaaatatcatcaatttcatctgtttcaatctcactctctctcatattcataggatcaattaatatcttaatagcttcaaatgattgtgatttcaatattatattatcatcctttaggaaaatgtttataagtatattaagtaaattttgattaaaatttttgaaaagtagtatatcatgttcaacaataattataattagttcagtgataagtaatctaatcttaattttagtactatctgttgcgttttttattgaatatacaattaattcaattaatcccttggatattaaaagtgtataaaatgaagttctttgaaaattttgtacaaactttgaaatcgttataattctatgaagtaattttatatgttgaaatatctttaaattgctatcattctccgtgtctatgtctatatctgtctctgcatcttctgcatctttatctgatttagtttcaagttttgtttctatatttttgtgatttttttcattcaccgtaattggtttgatttgaaatattggatctaaactttctggatgatcttctaaatagttaattattttcaattcagaaatatttatcagtgtatttatacaattaatatttgtttcatctaacactttaactaaaactgtattttttaaaaagctaaatgataaatatttgaaaacatcagttttaaactcattattttctttatcaatttcaaataaatcagtagttttcataatttcaattgattcttcataactcttctcccaattagatctccaactgagtttatatccttgtaattctggatcaaattctaatatacctaatatcttaacaaaaatttcattatttttaacaaataaattccaaagatcaatttcattaaaatatatcaaagatttaataatatcatttaaaatatagagcatattaaaagacttggaagattcaaataatccaaataatttacatatttcatctaaccaaacagcattattctctaaaattttaacaattattctacctctaaattctttgattgataataaatctaaaataccattcattacattaatatcatcacatggtgaagctaattctggcataggacctgctataagttcagtagtttcaccgtttgaggtttgaataattgcaattaatgaaattttacttgaaatttcacaattttcttgtatgttaattaaaaatgcacaaatttctaaacaaccttcaggttcttgaaatgataatgcataatcaactccgtcattatttgtccaaacaattaatgtatcctgttgtctttgatattgtgtatttcctattattggagaatttaataatactttatcgggttctgattcatcaacaactttaaaatgaggatttggaacaaaatgtcctgaacagtaacctgtaccgcaatcaacccatttatcatcagacagttgatatagtttaaccctccgttgaacagtgggttcactcattggcttttaagtaaataatgatatatctgaaaggtgtaactattgtgtttgacctctaaagtcaataatggaatttcacgaaattgaaattttgagatggatccacgttatcaaaatttcagtctttgttctttcagcttttatagaacgttacattactgtaaaggtttatcttagttaatgttagaaaattgaaagcggaatattaaaagatgttatgcatgtactatattttatataatgtaaatggacaatatgaagagaaacaaaaaaaattaaatacgataatatagtatatagtagtagtagtagtcataataagggaatataatcatgtacttagaatttactattattcaagacttctggagtagtaacaggccattgataattttcattagaagcataatcataaccatgttttttcataaattcatgcaatccttcaggacctcttgaaccgtaaggatataattctggagatgggcctttatcactttcaaggtaatgtaataatggagtaaataatgcccaactaatatctaattcatcatttctaacaaaatttgaatgatcatcatttaatgcatcatatattaatgattcataagcttcaggtatataaaattcttttgaataacgatctttataagttaaatcaagatctgaaactgaaactttatttggaacacctggtaatttaatattcattttaagatacattgcttcatctggttgaattctgaaaactaattcatttcttgaagaattttcataaatatctgcaactgattttttaaattgaattctaatttcaactttactatcattcagtgctttacctgcctttaatataattgggacatttttccaagtatcattatcaacatgtaatgcaattgcagcaaatgtatttgcctttgaatctgcattaacagtttcatcatctatataagcaggttttgaaccatcagttgatttagtatattgaccaattaaaacatcattgaaatcaattgtacgaattgcctttaataaattaactttttcatttctaatactttcaggatttgtaaaatcttctggttttcccattaataaaatagtgagaacttgtaaaagatgattttgaataacatctctgattataccaattgaatcgaaatatccaccacgaccttcagtaccaaaattttctttgaaagatatttgaatacaatcaataaattgattattccaacatgacataagaaaagtatttgtaaatctaacaggtaataaatttttaaccatttctttacctaaataatgatcaattctaaataactcttcttctttccataaaggagagagttcactttgtaattgacgagaactttctaaatcatgaccaaaaggtttttcaacaattaatcttgcagaaccctttgaactatctgaagggtaattatattttttcaaatttgttgcaactttagtgaaaactgatggaggtaatgctaaataatataatctattagatacttcaagtttattatcattgtcgaattttacaatagatttctctaattcttggaaaccttcagcttcatcataacttcccctatgataggtacaaatttttaagaaattttcaagttttttaatatgatcatcattatttttatcatattttaaatgttttgaaactttatccctgaattgatcatgagataaatcagaacgagcaaatccaataatggagactacttttggtaatttattttctctatataaaccaaataatgcaggaaaggttttcttacttgctaaatcaccggaagcaccaaaaacgacaattaaagcgttatcgtgaaaggacatttttgtttatgtatgaattgaaaagaaagtgaatataattaatttaccacttgtaagatgaaagtgaaggattggttaaattatattcaatattttagattaataatgaaattctaatctagctaagacagggtcagaccagtccggaaaaacatagtaaattttaaattttcatataaacgtcaaaaagtggaaaagtggaaaattatacttaaagagactaatactattagttattactagtaattacataatagaaattttttttgctttgaacatgtcccaaaacagcaattcctcaaaggccgtatatatgagtatgattcattatattaatatgttactgtttgattattaatcactgttcacaatctttaccacgtagagaaaacatctgggagtactggtgtactacttgtattgcctctctttctctcattggccgtctcaattgtattgattccaattgattttgcaaatttaatcatcaattccccagaattcttcttctcttcattacttttcaatccctctaacatctctttattaggtaattgtcctcctccattgagacaacctccaggacatgccataacttctgccatatcccattgagttaatgaaataactccatcagtactagtactattacttttacctctaacacctcttcttttacgttctgtacctttccattttctcacaccgttttgaatatttttaaatccgttaactatacctgctctcgaaataactgttccatcctttttaacggcttgaatttcaataatatcttcatttttaccattaataacattaattgtacattctccttcttctcctcctttttcacctttttttttacaaactttttcaatgtatgataatgcccatccaccactttttaatgcaggttgtaaattgttatcagtaataatacctccccagccgtaattatcaaattcgggccattgtggcggtgcatactccacataatcaaatgattcatcactattttgataaaattcaatatcacttaaatcaactaaacttatcaactctcttggtgtaacgacaaaatcaacaacatcatcacgactagcttctaattttttatcaaaacatggcattaatgataatacacatattttagcatctgatctctctttctttataacttcacgagctaatgcacctgtaatccattgaggtgttttaacttcacttaaatgttcaactaaatccccgtgtgttttttcaacgtataatctccatccgggacaaacacttgtcaaaactggtactttaccaccttttttattattaacttcttcaaataattcataatgtccaatctctcgtccaataccaacaccaacaaaatatgtaatttgaaacctttttttcatacttttaattattatttcatctatttctttaacacttttattaaattctttacttaatgaaattctactttgatcagataccatcataacataaatcatattatcatttggtttattttcttcccagtattcaacaaacttgctactatcatgttgtttgattaatatttcttcacttgatgttatacacccactacatgcaagacaatcttccaatgatatactaacttgagttttctcttcaattattttttgatctttattttcatcatcttcaatctctaactgtattactgcctcttccgatgttttaatacatgcaacactaggtttaataaaatcattcaaatcgtcattacctagcatagaagtcataatgtctttgtctactgaatgaaagatgaaaaagatcagattgattattaatttgaactttttcattcgatcaaagttctttgtcagatttgaaattttcttctcgcttaagtttcccctttggggtaatctttttgtgcttatctctgaggtgacgtatactttctttacaagaggtagttgatttactttatcagttaagaattaagcttatttatataattaaatagtttagaaaagagaatataaatgaaaacatagattaacaacatcttgagccagtagtagattcacaacatttttcacattgacaattgtcttcacacttacaatcacatttacaatcgtgtgattgacatttagcacatttagtagattttggagcacaacatcctgagccagtagtagaatcacagcatttttcacattgacaattgtcttcacacttacaatcacatttacaatcgtgtgattgacatttagcacatttagtagattttggagcacaacatcctgaacctgtagtagaatcacaacatttttcacattgacagttatcttcacatttacattcgcattcacatttgtttaatgtacacttagtgcattttgtggaagcagcagtatcagtattagtatttgagcagcaagacatgtttatttaattgattttgtttgataaaagataaagatatatacacttaagacaaattaagcttaaaaataggagaataatgccctttaatttatagtcttcaaaatgagtgaacgatttgagtgaaaattgcgttgaaaaaatattttttcctggagaacaatagaaaagtggatgaccaagccgccaactattgatacaatctgcgttctttttgccaaacatcgatacagatgttcttaaaggttctaataatggcttagaatgtattcttttacttaatgattgaatagtatatcataacatatcaaatttatacactgaaattatcaagttcgaattgactctggccatcagagtgatctaaagtattaatatcatcataggcactattattagtcttgctagtttcagtaagttttaaataaaatctcaacaacgctaatatccataattgtaatatcattgccgcacttgtaattgttaatatataggatgaatgatcagctccaagattaacaactaattgcatttgttcctcatttgcacccataaataaaataccagataaaattaatgcaaatggtgttaaatattgaaaactacgaatttctccatcaatactttcatctttgtcatccaataagaatgaaatttcaacaattctagctaatccaccaaacattaaaacatatccaaaaaatgcatgaactttggtactaataattaattcttgaacatgtcctgacattgcataacctgttaaaatcatcgttaatgcaggcataaaatttctctttctattaatagataaaaacatacctaaaagaccagctgcccaaaatataatacccattgatgtatgttgataatcaccatgagaccatggttcccatggtcgatgttcagtaaatgtatttataacaccccaaaccattataactgttgaatcgtacatttcttgtgaatatttacccttatttactcttagccatggaacaaccaaaactactgataataatacaccatatactataaagctcatacccataataccatgtgcattacattgacctgtatgatcatcataacagaattcaagcattgaaacaacaccagcactcaatctaataacaccacataatacaattaaacatgataatattttatatgtaactgatataactttattactattattagtcttactattgtaaaatccaataattaaaactgttagataaaaaaatatcaaaaagatacctgtaccatgacacattttattttcatgaccaaagtaatcacgatacccccaaattgaatcaattattgagtatacaaatgatattgtttgaataataagacttcttctgttgtaactattgattaatgaataaacactaccaatcgatgaaaatataactagtattgcaagggaaagtaaccaatgaatacattttaaaaaccaatccgcatggaaatgttccttttgtgcattagctatagctgatggtaagtccatctccatcttgtattagatctatagttgttttatggaatgaaataacgtagttatggattataaatccgtggaacttagaacagaaaattggtaacatgaaaatcaattatatcacgcaataatgtaacacggtcttgattcttttttaacttgattgttataaaaaatatttggttacaaacttatatacgcatctcatatagatgataaagctacaattaatttttttttcgacgaaatccaaatatgctgtttcgacgtccgcctgttgcatcttcttgatctccggaattgaatggattaataagactttcatcttcgattgattctaaaacatccttttgaacgaacggtgttggatgaactggggaaaactgtctagtaaaaggatttataggtgacatctctggcattctatccttaggttcagatttctccccttcttctacacttgtagtatgttgtgattgtaaatcattaatattggtgtcattaaaagaaaaactatggtcctccgttgaaatgttaaaagttgtatcatattcattttctatatcaccattttcttcttctgattcctcctctatttcatcatcgcccaattcatcatcttcatcttcttcatcctcattcagaatgtcaagttgttttctcatatattcttcttcatcttcaacctctctgtagaacaatagataagcagtagataatccaacaccatcaccaaagaatttaaagacataattttcattaatcttctctacagtttcatcatcaaataacaaccaaccataatgttcagtcttcactaatgagacataatgtccatgatatggaccacccccaatatgaacaacaacaccatataattcgtataatttatcaggtttatcactatcattagttgtattacatattcttaagtttttaacatattcaacacggtaaaacagtttaactaatcttcctagtttttcggaatacttgaatctctttaaatgaaatgtgagaatctttggtgtcttcttaattttaacagatttagcagcttcttgatatgaaaagcaattttcacaatagaatttattgttctcatttagtaattcaattttagaaaatatttttaaacaatttgtaatagaagaatcaggttccagatcaatggataaatctaagaatttttcatctctatatgaagaagtatcgcatgttaaacattttgtttctgatgtaacctcaccttcaaatgtatcagatataatcttttcattgtttaaaagtttaacattttccagtatattattaatcaggaaatttaaaaattcatgagcatcttgatgttgtgcatttctgaacattatattttcacgtttaataacttcaattaaattaaatggtgttagaacacctgtgttagaataattttctgcaatacattcaaatgcatccttaataactgtaaacatattttcattttccattccatattgtaaattaaaaccttcatccaaattaattattgggcctctaattagagctgccttctttctccattctaataatgcatttgtatctttgattattccaacaacagtaagatttctttgagagtttctgtagtagttaagttcaagattcttaaatgcggggtatcttttagttatttttctttcaagtgcttcatcttgctgtttaggattaattccgaaatcactttggatataagtaatatcgtcattatcatttgatgaattatgattattttcattatcatttgagttcccgttattgtttattgttccaacagtggtagtgcttgaattatcagtatttgatctactaaacaattttctaacggagttcccattaccattagagcttgaagatgatgttggtatcggtggtatatgatgtgatgcttgatcattattcaaattggagttggtattagaatgtgtattgttatttaaagatgagatacaatgtggaatggtgtttttgtttcttccttccacgttaaattttctaggtcgttgattattctgattattttcatcccttgttgggaattgtagtatcgcctctctaaattgtttagtgtggtataaacattggaaaatagatgaaacgtaacaattgtaaccgtaattttcgataccgaaaagcttctctgaaccatctccatatggtaagtttttgttatgtttattaattacagtattagctaatttttcagactgttcatttgtgaatttcggtttcatcaactcaatcttaggttgcttttgttccttaatattcccgttaacttttaagttattgttagaatcaatcgatgattgtgaatagttttgagccacaaaagatttcgatagtggggtctttagtttttgcgagttattttgatattgagattcccttatattggaattatgagactctattgaaatatttgaagtggtttccccatcaggtttataatcaacacttggtgcaacggaattagcggaaccggacctttgctcattgtattgtttcactgttcgaagagtattgaggcgttcattattatttttcaagtcctttgaatccttcgatgtgtctttacccctatccttatctctggataatgactttgacttcaatcgtttaagcatatatggattgttgaattaaaagagtgtaaatagttaaataaccggtacaatatacaccaaacagaatgtgaaaagcaacaacagtaattaaaagataaagagtgacaagtgccagcttccacgttaaattttaaatttagtatcaaaatctcgaaattctgttatttttccatttattctgtgatggtctttgtctactgaaattttagttttcgattgtaatggaaggtttaaatttacatactttaaacttcacttatttccttctttaatcaaataaaagacattgcttgctctaattaagacgatatatccccatgtcacatccatatagagtgcatttaccggtgaattccgtggagaagggtggaaactgtggcaaaaacgacactatagctgatccaattaagccccatcaggttttggcaaatcatcaactacagacaaggacaaaaaaggcacatccttttttacaacagttgccaaatgatgtttcaaaatcattagaatcattgcatttatcatctcctcaaagaaaatattttgatcttcataatgatcaaaccccttctccgagaggtagtacaacttctagtagtccagtacattcattagattcaattaatactcaatctcagaaatctcaaaaatcacatcaatctaaaagttgtaatagatcaaatagatcaaaggttgtcgataacgaatatgattctgaatcggaaataaggggttatcaaataaaacgtggtaacaataataaaccttcaatataccaatcacaaacgagtaagattaatagtatccgacagatgatgattagtgatacagtaaaagacacgcacagtcataaacaaaagtctaatgtattgtctattattgatcatgtggaagctgaagaagataatagcactgaatatgatgaagatattaatagtagtaataataacacaacaaataatacaattactactgataaatcatttgatatcgatgattatgcaaatttaagttctcatgatgaaataaaagtacctgaagctgaagaattgaatgattccagtttcagtgataatttataccaattaaatgaaaagacaaaatcagttgcaaatctcatccaccctgtttataaagataccacaccaattgatgaagagccaactgataataatacaaaagtagcaataagtcctgtgaaatatgataatgataccagtaaatccaactttccaaatgatacaactactacacaacaaattaatgttcttccattggataaatcaattgaaatgtatagacaaaatgctaaaaaaactaaaaatccagaagttttattttcatttgcacaaatgttaattagaactgcgatttcaaagagagatgatatttcgttaacaaaatctgaaaaggaatcttatcttcacgaagcatataatgcattgaaaaaatctagtaaaatgggatatattgaagcacaatattatttaggtgatgcattttccgttggtttattcaataaaggtaaacctgaactgggtaaatcactttcatattttgaaattgcaggtaaagcaagacatgctgaaagtgcatatagaactgcaatgtgttacaaaaaaggttggggatgtaccagagatgcaagaaaagttgtaaaatatttagagattgcagcaatgaataatcatccagttgcaatgatggaatatggtatttatgcatttcatggtttaatgagtttccctgaagatattaacactaaaaagaaaggtattagttggttaagacgtgctacagaatgtgcaacagaattaagttgtggtgctccatacgaaatggctttgatttatatcaatggattcaaagatattgttattaaagatacaaattatgctattaaattattatttaaagcatctaatttaggtcattcaaaatcatcttcattgttaggtaaattttatgaagttggagatattgttgaacaaaatgctgatttatcaattcatttttataatataagtgcaaaccagggtgatgttgatggtatcttaggtttatgttcatggtattttgttggtagtccaaatttaccacaagattatgatgaagcatttgcatgggcattaagggcagctgagatacatcacaatgttaaggcaatgttattaatggaaagattttatcaaattggtgttggttgtgagaaaaatttagaaaaatctaaatattggggtgatttagctaagaaaactcaggataaagataataaaaataataaatataagctgaagattaagataaaatgagttagtaaagaatactgtaatgattttttttttacaattataataaaaagtttataaaacatttaacaataagaacaacaccttcattatcattatcaatatcaatatggatgtttcatacagcaacgtagttaaataaatatgaaattgattcaccattgtgtaatcttctaattgcttcagctaaagttggacttatatctaaaatttccaaaattggacattgacttacatgttcacccaaaggcattgaatttgtacaaataattttctttaatgaacttttatttaatctttcaattgcattaccactaaagataccatgagttacaattgcaataacttcctttgcaccttcagctaataatatatctgaagctttacataaagtaccacaagtatctgccatatcatcaactaaaatacaacttttatccttaacatcaccaactaaaaccattctactaacttcattagcctttgctctctctttatgaattaaagcgaattgggtatctaatttgtcagctaatgaagcaactcttttagctccacctgcatctggtgataccatcataacctcatcagtatttttataattatctttaatccatttaagtacatttggttcagcatataaattatcaacgggtatactgaaaaatccttgaatttgcgaagcatgtaaatccattgtaataacatgattacaacctgcagttgttaataaatttgcaatcaatttagcactaattggaactctacttttatcttttctgtcttgtcttgcatatgggaaattaggtataacagctgtaattgatcttgcagatgcttgagtacatgcatgaatcattaataatagttccattaaataatcatttaaattatcatatcctccacaaccagtttgaataatataaacatcttcatctctaacagaatcttgaacaacaattgcactttcattgttttcaaatttaattgcttcaatatttgaaagtggtaaatttaattttttacatattaaatttgcaagttcaggatgtgaatttgcagctaaaattttgatattattctttgcttctttgtttgtcattgatctatcagataatcctctttcggttgacataattaactaatatattatattacatcacaactaaattttaaattttgcattaaatcgatatataccccagaaaagtagaaatttaaaaaaaaattatttggaaaaaaaacatgttgcataaattattattggatttatcaatgtaaggcatatagtcgatcgactttgtgtgtgtttatcataatatattaattaaaggacaactcagtatacatcaaaggaagttcaagccttttgattgtgatactatttgttaactataatatatcaaacaatgtcaacacaagcttataagagacttaataaagaatttaaggagatttcagcaaatccaccaccatatatcattgctagaccatccgaatcaaatattttagattggcattatataattactggaccaccgggtacaccatatgagaatggacaatatcatggacgaattacatttcctagtgaatatccatttaaaccaccaagaattaagatgtgtacaccatcaggtagatttgaaattaatcaaagattatgtttaagtatgagtgattttcacgaagaatcatggaatccatcatggtcagttgctacaattataacaggattattatcatttatgacaggtgatgaaagaacaactggtagtatagttacatctacacaaaccaagattcaattatctaaaaaatctaaagaatttaatacatattctaatcctccatttaagaaaatattccctgaaatttgggaacaaaacgttattgatttaaagaaaatggcagaggaggaacaagaagcagcgaggactcgtataacccctactaaaccagctataaaacaggaaaagattattgaaaatcttgaagaaattgaagaccctgaagataaaattcgtgctaaactaatcaatgaagcaacccatgataaaaccggtaatgttaaaaccaacagtgataatactaataaaaatgataaagataaagatgataatggcagactcaattcaatttacatcattgcatttgtgataataattagtattattattaaattatttttagaataaaagaattattatgatatttgatcaagatattcttgtaaatcaatttcatcgaaaattatttcacacattaatgaacaagatgggcaaactgcaatattttcaccatcttgtaaatcgtaaattgaaatttgaaatctatcaccacatggacatggataagtgaaaagttgagtatctggatcgaaggtaaaatcttcaatttctatttgatcgtagatagtttcagtttctgacattgtttattgggtatagtatgaatatagaactatgtagtaattatttgaagattttaaagattttaaagaattaaaggttttaactgtttttcatatttctccttaatactattgaaaaaaaataattgaaaaatttaaacttaattacgtacaaaatattatgtaatccaaaacaaaaagaaattaatatcacgtgtacattactaggtctattttaaaacttatcaacccttttttcctttttctgatgggtgcgcgggtgacataaaaattataaaagacattaaatctttagtgcgttattttgtgactgcgtgactgtgaaaaatactttgaaaaaatttaccttcccccaactgcccgcaccatttcccactgaaaaaaaattatttgctcccagtaaacccaacgggcctaccaattccagaatctcctcctcagcgttgacttgatgattttttttttcagattacttagtattatagcactttttacttaatagatttttctattttagtattattttaaattttaatacctattatactttatttcctttaacacagaataatgtacgtattaaacatacctatatgaattaaatatatcatattaatcaagttatcaaatgttcttaatgacaaaccgtcgatccattgaaattatcaatcatttatcatatcataatttaaactaatgttaaaatcaactataattaaaggaataacaccaaatataacaaatgtttataagaatctacaacatatctatcatacaatatcagttaatgttaatgagaacactttaatagcttttgatatcactaagaattttatactaacatttccttaataattatcattattatatttatcttattttttttattacagtcatcatgggtatttcaagagattctcgtcacaagagagcagccactggtgcaaagagagctcaattcagaaagaagagaaagtttgaattaggtagacaaggtgctaacaccaagattggaccaaagagaattcactctgttagaaccagaggtggtaaccaaaaattcagagcaatcagagttgaaactggtaacttctcatgggcttctgaaggtgtttcaagaaagaccagaattaatgttgtcgtctaccatccatcaaacaatgaattagttagaactaacactttaactaaatctgctattgttcaaattgatgcaactccattcaaacaatattacgaatctcactatggtttagttcttggtaagaaaggttctactgaagttgatgaagttaagagatcaaaatcagttcaaaagaaattagcttcaagagctgatgaatcaaagattgaatccgctgttgcagctcaattcggttcaggtaaattatatgcagctatctcttcaagaccaggtcaatcaggtagatgtgatggttacattttagaaggtgaagaattagctttctacttaagaagattaactgcaaagaaataattttgctccttttaatgtatcttaattaattttaatctcctttatataaaaaataaatatcacaattctaacaatcttattagtttaattgaattagttctattatgaaaaatatactgtaaatactaaattaaagtatgattaagatttttgaagtgtattggatctactgatataatacatttcaaaaatcattcaatcatcagctttaccgctggcatatatctagcaaatatctattaatttacattgatactaaataaatcataatcctgtcacggttgagtttctacgttaattgacttattttagatacatgccttaagaagattacacctatttctgcatactttattggcagtttcttaggatagtaaattgtaggtattattgatactaacaatatcaaacaatattaacttttatcacaagcataaagtagacttcataatcagcaccagaagtttaaaggtagatttaaaccaaaccataacaaaggtttgtatgatatatagtgcaaactacattcattgtaaaatacatattagtagttataaaaatatctaaaacaacgcaatactttaattcagtaaaaaggcaacaattatttatcttcagattccgaagaatcagtacaggtctgtggaattgtatatcatcattaaaaagtacgttttgtttcaaatataaagaaaaaagacaggtttaaatgtataatgcacctgcattttacctgaaaaccctggtaaaagaaagaagaaaacgagtaagtgattgaagtggatacatgcctccttttataggcagcggtttaaaaaaatattttttcagtagcggtttgatcttatttttagggtttctctacaaaatttatatagtgaaggaatgtagtaaaattggaaatggaaatagtaatgatagttatacaggaactataataaaaatgaattaattcatgattatgattatatagtgaatgatgcatgattaatttttagtagcaactttttcagcctttgatttatttttattttctctggtatttttagcagtttcaccagcttcagtatcaaggatgtaatcccataatctaaatgatgatgcataattaccaataaaatgatgatgatgttcatcatgatgatctgcacctgcccatataaataagaaatgatgtagagaaattgggaattcataacctgaatgtgcatcaattgcttggaataatctaagtgtaatccaaatacaaattgtaaataaatgtaaatctcttgtgaaataacaccaaacaattggaataccaacagtaccaaaacctaataacataacttcaattggatgtgcatattctgctgctaaaccaaaaggtgcagcatatctatgatgttgtttatgaatatatctgtaaaatgcaccataatgaatacctctatggaaccaataatgccatgcatcctctaggaaaaagaaaattgtaacttgaattgctattttagataaacttgggaatggtacatcatatgagacaccaattttttcacaaattggatgaaagaaccaaattgggaatgcttcaacaaagaaatgtgattttaaaacagattttgtacattcccattgttctttatcacttggataaacatttggttgaatcttatattttttaaaatatggtgttctatcaataatataccatggaagacatctaccgaaatacattacttcatgaagtaaaaagaacagcaaaccagttgcaaaaatatcattatccatataaacataatatgatgcccatattttttcaaggaagtttaaacctggtacttccttaattgtaccataaatttgtgaaaatgtttcctttgatggaatatcaactgaattcaaaccgaaaactctatagtaaaatgaaaaaaggcaatgttagtatttatttctgtataaagaatccatgttgtaattataaatcatttacatactgactcatcttgttcactggttaaaagaaagaataataataacctaaaagaaagagataaatgatagataataaaataaataataaattacaatactaagcaataattacaaaaagaaaagttggaaaataattatgcccaaataaacacggttattattgaaaagtctgatatcaagctcgcggaacgatgaaattgcaatttattctatacgagctatacgataagtgcggaacgagagtattttggactatcttcaacttaatggtaatgttgatgttgatgttgatgttaagatgataatgttacaagaataaagtttataacatattgaatatttttttaacaatttaaacagaaaatacaaagggtaaacgtgtgtatatatagtagtggtaatagtatattttatttaaatacattcatgctgaagcttcattcttagcaacccattttcttgcatttctaaataatctaatccatggaccataaccttcccattttttactttcttctaatggataatatgaattagattctaatctacaaactctttcagggtgtggcatcattgctaaaactctaccgttcaaacttttaatacctgtaataccatttggtgaaccatttggattgaatggatatttctcagttgcaacaccataattatcaatatatcttgcaccaactaatcctttcttaataaatgaattcatttgttcttcattttcccattgtgctctaccttcaccatgtgcaacagcaattggaattcttgatccattcataccatcaaagaaaacacttggattttcattagattctggtaaaatttctaatgtacaaactctagcttcatattgttcagatttatttctttcaaaacttggccaatcttctgcacctttaattaaagatttaattttacttaaaaattgacaaccattacatgcaccaaaagcaaatgtatcagttctttcattgaaaaatttagaaaattcatttcttgctctttcattatataaaactgattttgcccaaccattacctgcacctaaaacatcaccatatgagaaaccaccacatgctgctaaaccaacaaaatcatctaatgtaactttacctgaaataatatctgtcatatgaacatcaacactttcaaaccctgcttgttggaaactccatgccatttcttgttgaccattaacaccttgttctcttaaaattgcaacctttggtctagttgttaatgatttaacacctaaatcatctgctggttcaaatgttaatgcatattgtaaacctggatcattgttatccgcaatattaccaaattcttgatctgcagattgtggattatctcttaatttttgcatatgatatgaggttaatgtccattgttcttgtaatttacttcttggttcattaataacaacttcattgttaaatttaacttgaatatcttgagttaaatcaaagactggagtaccaacaattgaaatatattcacttgtaacaccattagtttcaaaaatattaacaaatgatgaatattcagattttctgatttggaaaactgcacctaattcttcgttaaataattcagtgaaaacatcttgtttaccattaatattaatatctaatcctgatctacctgcaaatgccatttctaataatgttattaataaaccaccatcagagatatcatggtatgctaaaacatcagcattattatgtaatgcaatagtagaattcaagtaacccttcaaaatttgattatcatgaacagttggacaagtattaccaatttgtttataaacttgagcgaatgctgaaccacctaatgattttccactcttagcagaaagatcaacatgaactaaaatagtatcatcttccttttgtaattgaggagtccaagttttggaagtatcattaacaccacagaatgcagtaataattaatgataatggtgccataacagtattcttttcccaagtcattttcattgacattgaatctttaccaacaggaattgaaatacctaaatctggacataaatcaataccaattgcttgaactgccttatataatgcactaccttcaccaggagttgaagcagatgacatccagttagctgaaagtttaaccatatctaaagttttaatatcagcagcaactaagtttaataatgattcagcaacacacatttttgcagaagcagcagaatcaataattgcaattgttggcttttctcccatagctaaagcttcaccagttttaattaattcatcacctaatgatgtacaagtaacaccaacatcagcaacaggaacttgccatggaccaacaaattgatctctatcaattaaaccagtaacagttctatcaccaattgtaataaggaaagatttcgaaccaacagcaggtaattgtaaaactcttgataatgattcatttaagttaatatttgagacattaattggtgataaatctaatgttttagttaaatcatttcttgacatttttggtggtttaccaaataataatgacatttctaaatcaattggagttgtacctaataatttatcagttaaaattaatctttgttcactagttgcagtaccaacaacagcaaatggacatctttctctttcacaaatttgtttaaataattctaaattattttgggcaacacctaaaacatatctttcttgagattcattacaccataattccattggagacataccaggttctaatgataaaatatctcttaattcaaatttagcacctaaaccattatcatgaactaattctggtaaagcatttgataaaccaccagcaccaacatcatgaatacattgaattggagattctaaacctaaactattacaagcatcaataacttgttgagctcttctttgcatttcagggttacctctttgaacagatgcaaaatctaaatctgctgaaccttcacctgatgcaactgatgatgcagcaccaccacctaaaccaattaacattgattgaccacctaaaacaataattgcagaatttggagtaattttaaaatctgattttaatgctaattgaggtctgattgaacccataccaccagcaatcataattggtttatggaaacctctgatttcttcattaccttcattatttttaactgatgctgttaaagttctgaaataacctgtaatacaaggtctaccaaattcattattaaaagctgctgaacctaaaggagcttcgatcataatatctaatggagaagcaatatgatttggtttaccaatatttaattcccaaggttgttttaaatctggaatttgtaaatcggagacactgaaacctgataaaccacattttggctttgaacctctaccaacggcaccttcatctctaatttcaccacctgaaccagttgatgcaccagggaatggagagacagcagttggatgattatgagtttcaactttgatcaaagtgtgaacagtttcctttgttgaagtccaagtatttttatttttcatatttggtgcaaaaacgtaagctggagaaccttcatagacagctgcattatcactataagctgagattgtatattttggatttaatttatgagtatttctaatcatttggaataatgacatgtctttatcttcattatcaattttccaatcagcattgaaaattttatgtctacaatgttcagaattaacttgagcaaacatgaataattcaacatcagttggatttctatttaaaatatttttaaaagcatcaattaaataagagatttcaccttcatctaaagctaaacccatttctttatttgccttaattaaattttctttacttgaaataatatcaacatgaactaaaggttttggagaatgttcttcaaaaagatcattgaattttggaattgattcattaatatataaagattgagtcattctatcataaactgaagcaaaacatgaaaattgtgatttttcaaataattctaaaactgggaaaccagctcttacagttaaaagaatcgctaaacctctttcaactctttcaattttatcacctaaaccgacaacttcaacgatatttgtagctttagaagaccaaggagagatagtaccagatctaggtaaaattctaattaagtaagtatcttgacttaaattttgttttaattgagtaattgaattttcatcatcaccttcaagtttaactaaatttgataataattgatttttttcatcatttaaatctaaatcattatcatattttaataaaacattaagtttattaatagtttcttcatctaaagattcctttacatgaatataatgaatttgacaagatctaatatcagtaacaactgaggaattaacagaactattaatatcagagattaaatttgaaactctgaaatttgataatgcctgagatccaggtaaaataatcatattatcagaatttgaagacatgataatttttttgattaatttgattcggtttgattaatgcaattagtgaatatcaattacttgaattatgaaaagaaagaagatctaaagagaagttcaagactgatatcaagatcaaaaacatgttaattctactaaatcgataatttaattaataaattttttgacatgcatactttctattgtccgtttaatcagtcactttatctaagtgctaataactactattaagtgaaaaaaaatttttgacttctctctgcgtgtttacgtaatgtgttacgtaagacagcgacgtatcgacgcttgtgggatctcgggattttcattttcagcttcaatgcatgagaagttagaaaggtgttgatttaacattggtttgaataaagatagataaaggctggtgtggacataacaactggaaacatgactccggtgaaaaggaagaatgataatcttctaagtgaggatttgcatgacgaaaagaaagtcaagttggaatcagttacagaacaaaatactgataatagtggtgataaaggtaatgtagatgtcaatgatgatgtcacagaagataaaggtgatgatgacaataatgatatcaatgaaaaggataaagaaggagaggaaacgcccaaaaatggtgatgaaaccactggtgaagttgaagatgaagagaaacgtagagtgcgtagttatcaatttgacggatacacttattcatataaggtacgaccatcagttttagaggaagaagatggtaaaatacgatttgttgttgtaaataatgatgataaacatgatagtatgattgttttaacaggtttaaaaaatatttttcaaaaacaattacctgaaatgccaaaggcttatattgctagattggtttatgatagaagtcatttatcaattgcaattgtaagggataatttagtagttgttggtggtattacaattcgaccttttgaaaatcatgaatttgctgaaattgtcttttgtgcaatatcttcaactgaacaagttcgagggtatggtgctcatttaatgaatcatttaaaagattatattaaagcaacgacaaagattaaatattttttaacatatgcagataattatgctattggatattttaaaaaacaaggttttaccaaagaaattactttacctaaaaaagtttggatgggttatattaaagattatgaaggtggtacattaatgcaatgtacaatgttacctaaaattcgatatttagatagtacaaaaattttatctgtccaaaaagctgcaatattgaaaaaaattagatcaataagtaaatctcatgttattcataaaggtttatcacattttaaaaatgaaaattttactccattaaatccatttgatataccaggtatcaaagaagctggttggacaagagaaatggatgatttagctcaaaaaccaaagaggggtgcacatcatattccaatgttaacaattttaacagaaatgcaaaatcatccatcaaattggccatttttacaacctgttaatagagatgaagttgccgattattatgaagttattaaagaaccaatggacttaagtacaatggaagttaaattagagaatgatgcatatgaatcaatggatgatttcatttatgattgtaagttaattttcaataattgtagacaatataatggtgaaaatacaacattctataaaaatgcaaataaacttgaaaaagcagttattgcaaaattaaaagatttccctgaatattcaagtagtttggaaattttgacaaaaaggtaaaattaatgtgattatgtttaatgatttcaatgtataattcgtgtataatagtaattaaaaaagattttggttatttaaaatgaacaagaagatattataaaagaatgaaaaatattagtatacattatatcagaattattcttccattctatcatcaccgtcattagtaggagcaacatcttcattttccttttcttgttgttttaaaaactctataatttcagcaacttctttatcagaatatactctaaatccaccatcttttgtaacacttgctaattgagcattatttgattctaatttttcttccataacttgtttaagaattttcaatgataaaacttctgcttcccttaaagttaaagatttatgatattcattttgtaattctgcttgagcaccttcagaacctgaaccaattgcctttgcatcatatctataaaatgtacctgaaggttctgcatgatataattgaggtcctttatcatcgtcgtaacctgcaattaaaagtgcaacaccgaaaggtcttgacattaatctttcttcacctgatgcaccttcaccaaatcttaaagctaaatcacaaactgattgagttaatgactcaacagagattggttcattataatataaatcatgttgtacagatgaaactctagcatgatcaatcattgatcttgcatcagctgttaaacctgacattgcacatcctatatgtttatcaacttccataattttttcaatactatcactctctaaaagtgatgatgaaactctcttttcaacactcaatatcacaccttcacttgttgaaatacctattgcagttgaacctaatttaattgcttcaagtgaatattcaacttgaaaaagacgtccttctggtgagaatgttgaaacaccacgatcatattcacttcttgttaaaaacattgttgtatttggtatatgttacagaaatattccctatacttcaatcaatacatagagggcaaattagaagctaaaagctgtacgtaacgtaatggaatgaaatctttaaatttgttagcgagcatgaatatttcaatttttgctgatgtaataaacaccttttttgtattgataatttgttatggactattgcacagtttggcttttcttgaatcaaaaattaatgttaataaagcaatgtttatatagagtatagttatatgatctacatatatgatagttaattaaattaaattgttaatctttcattatataaatctttatcatctaaagggtgtgaataagattctgaaccatcagcaccagctttttcattatttaattttaaatgagcatctcttccataaacaaaacctggtgaaaaaatacacataatcaaacctgctaaagatatcattaaaccttctaagatatcaaaatagatttctttagtggcaattttagaagaccaaccctcagctgtttcaattaatctatagattgatctaacataaattaagagaacagaaactgatattgcaacaaagaaacaatttaaatattttcttaatctaacacgtgaaaaattaggattaaaatttgaatcaccaaattgtttcttttctttaataattttaacaataaatgaataccataaaagctggaaaactgacattgttgcaacttgaaatgctaaaccaacaatcattacattagaacctgtactaactgaattaacccttgaacctgatgagataccaccaccagctccttgaataaaaattgataaaacatcacaaataatgaaaatagttgaataaagttttggttttaaataagaatattgggtaccataaactaaaactaattgtgcaaaaatattataaataccagccattaaaaaacatggtgcaacagtaatacaaactaattccataacataagcacttctactagtatcatttaaagtataccaaattctaccagaataacccacaacttctaacaataatccaataccccaactacataaaaaccaccattgatgactccaaatagatattgtgcctgttataacagtgagaaatgaaaatacaacagtatatgctataccacttgcaatatggggtgtttcaccattaaagaatgactgtctagcaacttctgacatttaagtttggttgttttgatgaattagtaaaattttattgaattttatgaaaaaataatcataaatttaacatctgacccatatttatcaattctgtttgcaattgaagacatatttatagtatttttcagatattaatattttaatattatattcatactatattacattaaagatgtcggtactacagttttccattggtttaacttagggatggaaagataacattaacagttatgattatacataatgattttaagattttaagattctaacaaattaagcccccaattttaagcctctaatttttttaagccttcaattctaagtctccaaaatgtaacgttttgattgtccgttgcgggtatatgcgggtataaaatttaaaattaagataattcgtagttcctcggaacccctttattccaatatttacttgtcagaatcaagacaataatgtaggatataattcttgattaataaaaatgttaaaacaaagctaaaacaatgaatttgatgattgctaaataaattataatgtagttcaattgagatatccattcttacgtaataaaatacattttataaaaaaactgacaattcacaatatcacgtgaccggtctagaacgcgcgcgtggtgcgcgtaaaaaaagttgggcattttataatttaatttaatccgaaaagggaaatccctccgcttgtttgtgctaagaagaacccaaatttaattaagtttagacagtttctattgtggtggaaaattagaaaatttttttttcgtttctcagtgaacgttaaagtgactctattctgtactgtctctgtggatttgtgccgttttcctgttcagttggtataaattaagtggctttggcacttttttcacttcattcaatttaaattttcttccccattgcttctttctctttgtcaagacaaaaatcttacatataaattcacaatgcaattctctaactcagctattatctcaatcacttcccttttagcatctgtctctgcagaaaacattattgttgctcttaactctgatgttgcaggtaatgttaatgattatttacaatatgttcaacaaaatactgaagttaatgctgcaccattattatcactttaccaacaagcacaaacttatactgatgattcttatactaccttaattactggtgaagaattatcatcactttcagcatttgttactcaacttccatggtattcatcaagaattgaaccaaatgttgatgctgcttctgctacttcatctgaagaagcttcatctgcaccttctgcaacttcatctgttgctccatcaactaccgcatctgttgcaccatcaacttcttcatctattgctccatcaacttcttcttcatccccagttgaaacttcatcaaccccagctgaaatttcaacttcaactaatggtaatgcaactgaatcttcaactcaatcagtttcaagtgcaggtgcagctaacttattagctccaggttttgcattagctttaggtgcaattgctttattataagtataatattatttgatatgataacatactataatatactataatttactattttatcttacaatctaatttaatttactttaatttaatttaattaatttcaattaatttaatcaatcagtcttgtaaacattttgttttattgtgctatttacctttaatcatttttacttttttacttttcctttttttaacgttcataattgtataattgaataaattaactattaacaatcaagcatctaatataatataatacaatcactataattataattagtacaccatacggacctaccggaatgtgtgtgtctccacagcatgtcaaaaatagcccttcgttttatgccaccgccactagctctttctcacacttgcgccgttccttgaactcatcgctcacttatagcctattctctaagtttgtggcgcattttctctgtttttacaagttctttaatgtggcgcatgattttgcattattaaatatcgttggagagggctcagcgatttatttatataccccatttgaaattaacgagatctatatataaaaggctcagctgaagataaagaatagatattgatgttgatttcccttctttttccttttagcaagtatggactcttacgctacaaacttactacaatatattccaggtgtatctattcttgaaggtgcaattcaaagtgttttaattaatattttgaaaactggtccaattccaaatcatttatcattcgttatggatggtaatcgtagatttgctaaaattaataacttacctttaaaggaaggtcatagacaaggtgctgatgctttagctagagttttagattgttgttttagaattggtgttaagaatgttacaacttatgcattttcaattgaaaattttagtaggaaacctgaagaagttgatacaattttcagtttattaaaagttaaattagcaatgttagcaagtgaaaatcaattatgtgatttacatagtgttagagttaaaattattggtaataaatcttatctacctgaagatattttaagtgatattgaaatggttgaagaacgtactaaacatcatgataaacatgttttatttattgctttcccttatacttcaagggatgatatgtggtatgcaactgataaaattattgaaaaatttaataataaggaaattactttagatgatattaatcaagatttatttcaaaataatttttattataatgaattatctgaaaatgttgatattttagttagaacttcaggtcatacaagattaagtgattatatgttatggcaatgtcatcaagatagtgtaattgaatttccaaatactttatggccaaattatagattttataatacttggtggacaatttttaaatggagttattataaaactttaattattcaagattcagaaattatgcaattaaagaaaatatctcaaaaggatgttgatgaaaaatataagagagaaattccaaaaattcatccaccatttgcttcagttaataaacattgattgtataatatttagactgatatctttaagtcattgctagattttattataaaagataatttaaataattcattgattgattgattatataggaaatatttagttatataaaaaaaatcatctatttaagttaaaagatgaatagaaaactttaataatgtagaaaagtagtaattaactatataaagataataaggaaaagcaaaacgattgaattgtaataactaaaaagcaaaatagaataaagtggttggtttaatttgttttgattttttatgattcaatgaataataatgatgaaataattaattaattctcttcagaatatctatgtaatgattctaatgcattaaatgatttaaaagtaccatttttctctaaatcttcttcaggattatgagcagtttcacctttgaaatattgtctctttgcaaatttccataattcagcagaaagtaaaaataataatgtacataagaaagcccaagcccaaccatgagtaatacctttttgaagaaaaacataatcattgataactggaatataaattgttggaattaatgaaataaatcctagtataactgaccaaaataaaaattgattaccccataaatctttcatccattgagttaaaggtttttcacaatctggatgcatataaaataatgatcttcttgtatgaataacttcccaagctaaaactaatgcacaccacgtcattgaaacaaatgatgcagcccttgctctaaaaacatattcacatgaatcagaataatctgttctattacaattttcacctaattcaccatgaccatatgcataaacttcaataacaaatggaatcatgcatgcacctgcaataactaatccataaacaaacatatcaattaaaacttcccatgtaaacactgaatcttttgcatcctttggtggtctatccatgacatcatctgcagctttttcaacacctaaacccattgcagggaaacatgaagtgacaacaataacccataaaacttgaactggtgataatgggaagactgaaaagccatccttatctttaaaaactaaaccaactaaaaggaaaattgcttgtgcaacgttcatacctaataattgaataacaaatttttgaatattatcactcattcttctaccttcttcaactgcatttaaaattgatgcaaaattatcatctgctaaaacaatatctgatgcatctttagcaacatctgaaccatttttacccattgcaataccaatatctgacatttttaatgatggagaatcattaacaccatcacctgtcattgcaacaatttgatttcttctatgtaatgcttcaactaatctaactttggtttgtggtgcacatcttgcaataactaatggtagaacaggtaatgcatcaatttgatcttcacttaatgcatcaaattgtgttgcagtcataaccattgaattaataactttttctggtaacattctaatattatctggtaaaataccaacttcttttgcaattgcacttgctgttgatggatgatcacctgttgccatatgaactgaaatacctgcatgatgacataatttaacacttggtaaactttctggtcttggaggatcataaataccaattaaacccagaaaatgtaaatctttttcaattaattctctatccattttttgccattttaaaccaagatgttgatcatttggaattctctttgcaaatgctaaaactcttaaaccatttgatgataatttattcatttgatcttctaaatttgtaattgtattttcattcattaattcaatttcaccagtcgatggattattccaagttgaacataatgttaaaattctttcaactgcacctttagtataaatagtttcaatattttcattattatttttataaattgatgacattctcttaattgatgaatcaaatgggaattctgctaaatattcaaattggtttttattttcaactaattcgtctctactgaaacctaatcttgtaacaaaaacttgaattgaaatttcagttggatcacctcttgctttccattcgttaataccactatcatcaatatcttcataaactttagcaacattagccaatgaagctgttaaaatccaatttttaaataaatcatatttagaagcattatttttgtattttgattcaaattcattaaaagtaatccaagtaatttcattttcctttttattatcttttaaatttgaaatttcaacaggtgataattcagtaaatctaacagtacccaatgttggattaaaaggttcattgaaatcttcaactgaaaaagtacctaaacttggaatataaacttgtttagcaatcatacgaccttgagttaaagtaccagttttatctgaacaaattgcattaacagaacctaaattttccaaagcatcaaattttctgacaataacatttcttttcaacatttcctttgcaccaacagccatagtaatagttaaaacaacaactaaagatgaaggaatcatagaaagagcaacacaaatagcataaacagcaacttccttagtgacattaaatttttgagaagccataacaacaattgcaaaaacaactgcaatccaaaataaatagattgctaaccaagataatctaatttttaagggagtaccatctaaaatacctaagatataaccagttgaattccaaatagtccaaccagcagcatgagcataatcttttggagaagcttccgatttattttcaactcttttgataattgaattaccagtattaagagctttagcaattttaccaatttcagtattaagaccagtcaaaacagcaataccaatagctctaccttttgaaacggttgaagaggaataggataaatttaaacgatcaccaactggaatttcttgattaaagattaaattagcatcttttgaaacaggtaatgattcaccagttaataaagcttcatcagtttcaaaattatgagtttcaattaatcttaaatcagcaggaatagtatcaccaactttaacgataattaaatcaccaggaacgacatcttcagatgctattgttaattctgaaccatttctaataactacagctgatggagaacttaaatttttaagggaacccattgttttttcagcattatattcttgttgagtaccaacaacaacattaagaacaataataaaagtaataacaccagcagtaatccaatctttaatagcaaatgatataatcattgaaataataaggacaataatcattgcattaagagtttgtctcattataattgaagtaattgaaattttagaaccatcagaaatagcatttggaccataatgttttaataattcagcagctttttcatttgataaaccatgaattttacttgtattaaataaattcaaacatttatctattggaatcatataagattgagttgcagctgtagatggttgacttggatcattattaactaatgttgaggctcttgatataatatcttctgtaaattcactttttttttcaacagacatataaatgtttaactttgtgtaagtgtgtgtgtgattaaagaggaagtaattaaagtaattaaagtaattacagataggaaaaaaatattacttaaagtaaataaaatgaaaactgaaaaagagggatgagctgattacttatatagaaacagataactatggaaaaagagtcaaaaatagcccgatgtgataagaaaaaaaaaattaaaaataaaaaaatgaaaaaataaaaataaatcttatcttttttcaaaaaaaaaatagattatgtcatgagtggcttagacccttttattgtttttttctttttttaactattatttcctattatttctgattgttttcctattgtttttttttcaagggtctatctttataacttctcttatatagcttagatatggggtagattgagttatgccatggtaattggccagataactgcggcacatatatatatatatatatatatatatatattcattttaatacactatactatatttattaaaagataagactgaaaggaggtaataaattacaatattaaatagtacaaaatatgacataagtgatgaataagggctaatactattaagatataagatgatgtttgctaagctccctctcagccaaattgggtgatttgagcaaaatttgaatttacgagggggggacgggcaggggggaggcaattttctctcagtgagtgaatgaatgagtggctcatcaatttcctaggagataatagccgacccatcgacgcataatatatatgccctactttttaaaattattaataaatttagcttacgcgtcacccgttccttgaaattttgaaaaaagatttatcatattacaaaagacgcgtttgatacatgtcaaagagctatttctgatgtattttaatgtatatcgtttcgacctatatcatttttttacgtgtatcactgctgggtttgagagaagaatctttatttcttgctttcaattttgcttcaattctccattaactttgttttcttaattttgtttcacttattctttcccttctttatcttcttcttcttctctttcaaactattattcatcaaatcatcaatactcaaatgacatcctcacagccattcaataaattagtcaatttgaaattattatacacttttgatgatcaaaatacttttcttgcaagatcttcatctccaattaatgctagaattataactttaccaaatcaaccccctcataatggtttacaaattggttgtattgatttaaaatcttgtttaaatttattatcttcaatatctcctgaattttttcaaaaggaaatggattattcaatttattataaagatgtggtagagtttggtcaaccttatgttgcttctggtctttgttcaaatatacttaattcaaattcttcaaatattataataactggtacattatctgttaatattttaaatttatatcaaaataatgataataataatgataataaaaataattttaataacaaaaatcctgcaatactggatactttagatattaaattgagactatctcctctctcaaattcaattactaaaaatcattcatcatattcttataataataataataataataataataataataataataataataataataataataataataataataataataatagtctaccctcaaatacacagtttacacaacaacatactattaataacaacaataataacagtagtcccttaacaaataatgaattagtcacacctcaaacacagcaacaacaaagaaaaaagattaaaaagcaatcttcaatcgttaataattcattaaataataaacttttaccaaatttacctcaattagcttctcgtactcaatcattaccctttataactgaagattctttagctcatagaattagattatctgatatgatgaatgaaaaaattgatgaagaagttgattcaaatggtcaaccaatttcttcaagattctcaaattttcaaaatgataaatcaatcaatttagataatcaaccaacaaaggcaaaaaaaagtaaaagttttattcaatctgttgttaaaattggtaataaaccattaaataaaaagagtaataatactactaaaacttcttcttcatcatcctcgtcaataattacaaattcaaaacgttgtattaattgttcttcatcgaataatcctccttttagatttttcaaagatggtatttttgaattggctaattctggttatttatgttcaatttgtacatcttatcaatctaaaaatgatataaaacaattacgtgaaagaggtaaattaggttcaaagggtttattagatggtccatactcttcgaatattgtacaaaatcaaacacagaataaagttactaaacgtacaaagaagaaacaatcaattaattcatcactaataattgataattcaagttcaccccttttttcatcatctcctgttaatttgcaaaattcttataatggtggaagtttattaaataatgttgttggtaattatagtaaaggtaaaagatttaataaacaatatcaaaccattcatgaaggtattaataatgaagatttattagatcttttaaaattagactccaactttaataatggtagcaacaataacaataacaacaataataatcatttagatatgaatatgttaatgaatcataatatggatttgatgaatatgcaattgaataatggtttggaaccaattgaagatatgtttagagtttctgatcataaattttcatcttcttcacctactacatcatctaaaaatcattctaaaaataatacacctgatgataataattattataaagatgttgataatataccagttgatgcaactaaattaaatacaacacttataccattagatgatgatgataaagaaaatttcccacctaataataataacaacacagcttcagaaatgcctcctccatcattatcaactaaaccatttaatttacataatgaaaatgcatttatgtcaccaagtattcaacgtataattgagtcattttctaatgaaccaacatcgccaagtaaaacaactggtaatgatgaatggaactatgatttctttaatgaaccatcatcagaaccaattaataatgataatttatcaaatagatttaaaggatgtgatgatgttgaaattaatagagttttatcacgttcagaaaaatttgatgatataactccaaaagatccaggtactggacaaaccattcaaaatggtgattctccaaatggtttcaaaatgactccaagaaatcttgaaatgaatgaaataaaaactgatgtaatggaaccaaatgaaaataatactaatgataataataatcctaataatcctaatactattacaaaatcaaattttgttaaaactcctaatacaaatacaaagaaatctaaatttgaaccatcaagttctaaaaagtttaggttaccaatgccaagttcaccattttttcaagtgaataatgaagatgatgttgaaaaagatgaaaagactttagatacaacaattaattcaatggttaattgggatgcgaaatcctcgcctctaacagaaccgctttcatcatcaattgatgacaaatagcaactttactaaataaataaataaataataactaataaccaataatacgacttaatgtataaccaacgtatattctttcctaattgggtaactaaccatttctccaattcatgttgtctttattctaaaaattcgcgattatccgataagaacgtccaattcagcgatgacataatcttgaacttcaacacgtttacttattttccaacccccgggtttccagcttaaaaactggtatatcttttctttttaatttctttctcaaagtggttacacacgctatttagagaaccgtacactagaaagagaagaaatatattttgacaataacttttaaaaaatatacatagtatacactcatcaataaattcaaataaaatatcagaataatcaaaataagagtaataaaaatatgttagcatttaaaacaacaggatataatggatattcctgtaagtattcaccattttatgataataaacttgcagttgcaacagcagcaaattttggacttgtgggtaatggtagactttatatattgtcaataactgatgatggtagaattatacaagataattattttgatacacaagatggattattcgatatttcatggtcagaactacatgaaaatcaagttttaacttgctcaggtgatggttcaatttcattatttgatataacattatcaaatttcccaataaaacgttttaaggaacatcaaagagaagttttctctgtttattggaatttggttgataaatctattttctgttcatcctcatgggatagtacagttaaagtttggtcaccaattagagataattcattaattacattatcatcaaataaagatactacaataaaaactgataaaaatatattggatcaacctccattaagtacaaaaccaataataccaaataataataatgattgtgtttatcaagcttcattttcacctcatgatccttcaattataatgtctgttaattctgcttcactttgtcaaatatgggatacaagggcaacaaatcctttagctatgcaatttatttcacatgcaggtatggaagtactatcctgtgattttaataaatatagatcatcagttattgcaactgcatcagttgataaatcaataaaaatttgggatttaagaatgatacctgatttacaacataatttccttgcacagaagaatagagttggtccttcacctattaataaactgataggtcatgattttgcagtacgtaaagttcaatggtctcctcatgcttctgatactttaatgtcggcttcatatgatatgacatgtaaaatttggaaagatcaaactgatgaaggtgctagatatatgagtaatatgaaattaagatatggtgattctctaataaataattttgatatgcataaagaatttgtattaggttgtgattggtctctttggggaagaggctatgttgcaagtacaggttgggatgaaatgttatatgtttggaaggcaatataacctaatccattctacataataatatttcaaaattttattcctttacggtttcatctttttcattttttttatctttctttatatcttgggggtattttctataataaaatggcatagtattatatatagtacattaaacattaatatttacaaaatcaaactaactcgatgtctttatgtctatcacttgagaaacgttcaatttcagtcattatacgtgtaacccaaatatctctttcaattcttgatctagctaaaaataaaattgctcttcctgtaacacctaatctattggcagattttattaatgctcttgttgtgtgcctttttccactacttaattcatttttttgaaataaattatcagaattgccagatttactatccgtctctggattctgatcatcttcttcactctcataatctgtatcaaaatctgtttcattttcttcatcatgatctatatctgtttcggtttctgaatccgaggtaatggcaaaatcaattattgattttgactcatccttaaaattgaaatcacttttactatcattttctccatcctttttatctttggtaatatctaattttctaaatttattcttcaaattggagagtttagttgagttgttttctgaagtttttctgtgtggaatattcatagtttgagcttctgattcgcctgtaatattaatgtcatcatatttggatcttatctcactattgttgatattcactcctgttttctttttaatattttgaaccattgtcttcttagaaccaaaccataaagtaaaagacctcttttgttttgactcagtacttctccatccatcattataaactctaggtaatccactatatccattcaatggattggaaaacaatttagtatttacatcacctgtgactttaccgacagatgaaaaaacataacattcagctaaagatatagtagcaaactttctatgatacgcacagtttttagcaactttcgttctgctggatctattgaacggtagatataatactaaaaatccaggacttaaaactgcatgaaatagataaaattgtttactcttgaactttttacaatagatatatccttcaaataaaactggtttatcaagagagtatgttgaaatactgtataattgagaatctgtatatgcgtttgccaattcccacttattcaaaaaattattattttcatttgcaactgttgattcataattatcattttctgtattcattaatttcaaattcatttgttttaatagaacatgtctagctaaatcttcttcctttttgattgtccaatactcagcaagcttactcaaatttttggcccattcatctctaacagtcttagtttcagtttgtaatcttaaaataacaccacttgacatgactaaatccaaacaggtttcgacatactcatcatcgtcattaagttcaactttcttagcaaatttgtggaaatctgatttacctgacatattagaaactgttttcttccctttgggatgtttccaaacagtacttgctgcagttctggtcacaaaacttatctcttttctaggcactaatttaatatcaataatattgcataaatcaataacggcgtgtgcatttgataacatacaagcacgtctttcggcatgatatagagcatttgcatcatattttgaatattcctcttgtgtgattcctggttttaaccattcaatatgatgagctgttcttggaaatggtgtagattgataaacagttgaattaaatttagatgctttctcaagtttgggcaaattggtgacgtccccggctggtgtaataaaattatatgcgaaatcttcattttcttcagagttaggaaatattggaactgcatgataaaagtcttgtaaaaataataagttctctactgaaaatgcataaaataatctataatggtgaccaccaagtttggttttcaaatttcctgatctatcagttaatttagcaacaaacccttcaataggtaatggttcaattaaacttctatcacacaaataatgtgtttcgtgttgaaattctcggagttccagttcataatttgatccaaaaattgtccataaagtttgcacaatcaattcattttcacctaaaatccattctagacgatcatattttctgaaagataatgccaagaaagttctatcattttttaattttttaacaaaatattggtattcgggaatttgaggtagtttaccagatttttctagcttaagtatttgttccaaaattagatccaacagtttttcgaatgtcggtagtttgggataataataccctgttggtttatatcctagtttgacaaatttagatttattctcgccttcttctttataagctttgtataaagaattgattcccataaaggtaaatgaaatattgattgctggaatgcttatcaaaaatgcatttgttttattctttcctaaagtttttggactcaataactgtctcaagaaactataccacacaatagctgaagatgttgaatggggtaataatgtatagttcactgttgagtttttcttatctctgcttattctaatacttttatccaaaaaattagcaaatgaaattgatgtatcatgaattgaaagaactaatgaaaattgataatgtctatcggaggcattatcgtggatgtgtaaaaatttctcctttttaatagttgaatgtgtaacatccatcattttattcttttgtccaaatgaaaatcgttttattttctccttctttcttttcaggaaagatttttttgatttatgtgaatgacctatcttagcatcttcctcaaacgaggtttcattatcatcatctgattcataatccttattttcctcagatatatcaccatcattttcgctgtcagaagcatcaaaaaaatcccctggagcttggctatttaaatcagtagttaacgtatcatattcagcactattagggtattttgtctctaatatatttcgattaacttcttctagtaaattgctttcatcttctttcctgaaaactttgttagttctaaaaaactgaataactgcaggatattctacattgtttgtagctctaacaacaatgatatactctctccatctttcaacaattctggacgattttttagcatctttgtttaatttgaatttttctatttttgtgactaaaactaacattttctccattttaataatatcgccagtctgaaatttttggaaaagtttcttgtactgtctccttctttcaaatctattgatttcatgacttactcctaatcttgcacctaatgtttttgtcttgagcagattgtatgtctgcataacttcatcatcaatgtcagtatatgcttcgtttatattgtgatctaatatcccttgaagttttatatcattatgactattttcattattggtcttattgtttttgttatcatcgtaattattattattggtattctcagtagggttttcatgatcatttttatcattttcattattcaatttcctgttattatgttcaaagggcatgggagattgtttatctaatggtaatctggtacttttcaaagtataaatacttgatgcgggtaccatcttttgtggttcggtaaatgtaactttcttacctgtatttaaagtagtcttgaaagataccctagttggaaaacattcagttgcaggtggaatttcagccgttttatcattggcattaatcaaatcatcatctgaaatatcagaagctgtaacaaaggaagatgtatctgtttcacaagaatcactgtttttgataagagtttctgaagattttgtaacttcaatattcttctttttagatctatttttttgaagtagtatcattgcttcatttatctctttatctatgattttttgtttctcatcattggttgtttgataaaacttattcagttgggcatcagttttgttttttttactatcattgaattgttgatggcgtgcattacttttcttatgatcaatcattttcttatcttcggaaagatagggctgaatcttaaaatcatcatcctcttcattttcatcggttgtatttgattctgaatttgcaaactcgttaacaatttcataaaatttggaatttgaagtttcattagattcatttggttgattatcagatgtataaatactattattatttttttctttctctgatttcagatgtaatataaaagattttaattttgactccgataattcatgcgatagtagatgaatatttgattcaataaacttatcaattgaatcaccaaatgagtctgctacatgttcattttctccgtttgataaatgattctttgtcagccctttaaatatgaaatcttttatattatcatgtaaagtatcaggcatactttcttgactcattttattgacagcattctcaaattggtgtagggcactgtgttccggatttgtaacattttgcttagaatctgaattaagccttctaaatctgtaaattttagccagtaaaactgattttttatccaataaccaataatgaggaattgaacctaaggatatgaccgtggacgtgttgtaaagttctaaagcatcacaatatttcaccctaaaggccgtgtatgaatctcttggaatctctatataattgacatctctcttttgagtatatgagccattttgcatctttcaatggtatctaatagcatatcaactaaaaaagaaagagaaaaatataaaaaaatggagatttaaaattgaaaatgaacttatatcaaatcaataacaacaaacgagccttcatcaatcaataataatattttaaaaatataaaaattacaggagggcaaaaaagggcaataatttttcagttttaattaaataggctgaaaaatgtaaaaggggataaattattaattattattattacaatttattacataaggacattacaaagaatgcggaattaagtaacttttctaagctgagatttctgctctttcactttttttaactacgagaaatctatacttttctgtctgcttggttgggttataagttatttattataattattaattaaacctagtttgtaagacaattgtctattctggtgttgaatagagtatctttaattcatttgtcacttcatatatattcaattcttattgaaaaagtatatcctgtgtctttattattatactcaatagatcaattattaatatacgtgtttgattctattttagtacgattaaatcataacgcttataaattaatatacacacacataagcaacttttcattggtatacacctctgagctgtattacattattcatagaataatattatattcttcaacttattaataattcacatttaggaaaaaaatattccatctgatctaatattttttgtttttcaataaattaactcaaaattcctgaaatgtcccgtgacgataatccaaatagtccatttgctgataagtacaaatttagtgatctaacatatgcagatcctttaccatctccctctgtaggatataaatctaatctaaattcaaataaaagacatttttcaggttacagtaccaattcttcaaaagcaaattatgatgattttgaagatgcaaattcaataggtaaaactccaatggtacaccaagattctgcattttcttctaattcgtttactccaataaatttaaaaaattcaaatgttcatcaacaaaatttgtatgaatctgaagaagaaaatgatgagttaccggaattaacaactggtgcaattaaagatgataatttgcaaagaaataaaacaacttttcaaaggcatagatggggtactcaacgtaaaaaggatgggagacctctaaatagaagtaaaactttaaagaaagtttttgaaagttcattacctcctcaactattcccaaaaactgattcaggtgatgatgaacatttatatgagaatgctaataaagatgaaaaagatatgtcacatatgaaaagagatatctattggaaccttcctttacctgccactgatttagacgatcttgggaatcctcctcaatatgcaagaaataagattagaacaacaaagtatactccaattacatttattccaaaaaatctttattttcaatttggtaatattgccaatgttttcttcttaacaatgaatattttaggtgctttctcaatttttggtgttccaagtcctgcattatcttctgttcctttaattgttattgttgttattaccgcttttaaagatgctttggaggattcaagaagaactgtaattgacctggaagttaacaatcaaattactcatgtactaaaaggtattgataatcctaattttacaggtgataacgtcagtttatggagaaaaattaaaaaagctacaagtaaattcatattttcaatgctgagaaaaattaagaatcaaaaggaaatagatcctttggctgaagatggttatggtagaaaatccttagatagtattgattatagaagaagtttacagcaagaaagatataataacaatattcaagaaagtgatgatgttaatccattcagtgatcccattagtatgagaaatgaagatacaaatgataatgatcgtgatgaaaattttccaccatttgtttcagcatataatgatgattacattacacatccaacatttaaaaaagaattttggaaaaacattcatgttggtgatattgtcaaaattaaaaataatgactccattcctgttgatattcttattctatcaacatctgattctgatggtgcatgttatgttgaaactaaaaatttagatggtgaaactaacttgaaagttaaacaagcacttaaatgctcccatggtgatttgaaatcagttgatgatttggcaaaatgtaaattctggttagaaagtgaaggtccaaaggctaatttgtatagttatgaaggtaacctgaactattatgcaaatggtgatgatgaacgtggtgaattgtgtaatgaacccgtcaatattaacaatattttattaagaggttgttccttaagaaatactaaatgggttgttggtattgttgcatttacaggtaatgatactaaaattatgttaaatgctggtattactccaacaaagaaatcaagaatcgctaatgatttaaattggtctgttatcttaaacttcatgttattatttgttctttgttttgtctctgctgttattaatggtgttttctataacaatcgacaagtgtcaagagtgttttttgaatatgctagtttagttggttcccctgctgttaatggtattgtcagtttctttgtggcacttatcttataccaatcattaattccaatttccctttatatttctgttgaaattatcaagacagttcaagcattcttcatttattctgatcttcaaatgtactatgaaaaattagattatccttgtgttcctaaatcttggaatatttctgatgatttaggacagattgaatatatttttagtgataaaactggtactttgacacaaaatgttatggaattcaaaaaatgtacaattaatggtgtaaactatggtagagcgtatactgaggcatatgctgaaattagaagaagacaaggagttgatgttgaagaagaagctatagctgaaaagaaaggaattgaagatgataaagttgaaatgattaaaatgctaacgcaaattaattctggttctctttcttcaactattcaagatgatttaacttttatttctaaaaactttgcaaatgatttaaatggtgcaagcggtgaaactcaaaaacaagctaatgaaaatttcatgttagcattggctctttgtcatagtgtcttaactgaaagatctgaaaaagatcctaccaaatatgagctaaaggcacaatctccagatgaagctgctcttgttgccactgccagagatgttggtttttcattcgtcaatagaactaaaagtggtttgattttaaatgttcaaggtgaagaaaaagaatatcaaattttaaatattttggaattcaactctaccagaaaaagaatgagtgctattatcaagttaccaccaagtaaaccaggaggagaaccaagagcattattaatctgtaaaggtgcggactctattatttattctcgtttaagtgataaaaatgataaaacattattagaaaaaactgctattcaattagaacaatttgctactgaaggtttaagaactttgtgtattgcacaaaagcaattatcttggtcacaatatactgattggcaaagacgtcataaagaagctgcatcttcattacaaaatagagaagataaaatggaagaggttgcttcatcgattgaaagagatttaatgttattaggtggtactgcgattgaagatagattacaagatggtgttccggactgtattcaattattagcaagagctggtatcaaattatgggttttaacaggtgataaagttgaaactgctattaatattggattttcatgtaacttattagaaaacacaatgcaattgttagttatcaaaacaactggtgaagatattgagaaattgattccagaacatttgaaagatactgtattagaagataaatcagaagttgttaaatttttaattgaaaaatatcttgaagattattttgatatgattggttcattagaagaattagaaaaagaaagaaaaattcatgctcctccaagtggtaattttggtgttgtcattgatggtgatgctttgaagattgcattaagtgattctttgagaattaaattcttgttactctgtaaacaatgtaaggctgttttatgttgtagagtttctccagcacaaaaggcatctgttgttaaattagttaaagaaactttagatgttatgactttagcaattggtgatggttcgaatgatgtttctatgattcaagctgcgaacgttggtgttggtattgctggtgaagaaggtactcaagctgttatgtcttccgattatgcaattggtcaattcagatatttaggtcgtttagttttagttcatggtagatggtcttataaaagattagcggaaatgattccatgtttcttttataaaaatgttgttttcacattagcgttgttctggtatggtatttatgacaattttgatggtacatatttatttgaatacacttatttgatgttctataacttggcatttacttcattacctgttattttcttaggtattatggatcaagatgttgatgattatgtttctttacttgttccacaattgtatagaactggtattttaagatctgaatggaattttcaaaaattttactggtatatggttgatggattctatcagtctatcatttcttttttctatccatatttcttatattacaaatctggtgttgtttccaatgttggtttgtctcttgatcatagattttatatgggtgctttagttgcttccattgcaattgtttcatgtaattcatatgttatgttaagacaatatagatgggattggttatcatgtttgattaattttctttcaaatatcattttatttggttggacgggtatttggtcctcttccaccgggtcaggtgaattctacaaagttgctgcacgtttatatggtgcaccttcattttgggcatgtttctttgttggttatctgatgtgtgtcttacctcgtttcatttatgattttacatgttccattttatatcctaaagatattgaaattattcgtgaatgtgttcaaaagggtgattttgatcaatatccaaagaattatgatccaacagatcctaacagaccaatgatatctaaatacacacaatctcatactttagaagcacatgtttctcctgttgatttccctgctcctggtccatcatatagagattccattactggtagtgggggtgctcgtggaaatactttcagcagaatgttccgtggtaataacaataaattttctcctttcattccaataaacccatcacttgaaactttagcaacagaagaaattgaaatggagtttcaaaagggtagaattaatccagatggtactcttacaagtccgagcttatcagttaaaaataacaaaattattggtgacagtttagaagaaaccagaagaaatatgaatcttaatgatttgaacaatgctgaacatagaggtccaagttttgatggtttgagaactagtctcgatttaccagagttaactaatgctagaagtttattgagtaatctgtcacgttaattctgatactattatatccaatcttcattgtccacatgtattatacgaaatttcatgaattcattaatgttattttctttcccaacattaatcttgtttttatttattaattttttatcttaattttatatcattttacaaattacattcatttatagtcataagtttattacattcttttaatattatacattgtaaattaattgaatttttttggaaacagtttttgttctaaattactccaaaatcctttatcgtagatatttgccaagtcatcccaatcatttataccctttaagttgccagcagctgtggtattgaatggtaatctatcgttgatggttataaaaagcggcttcccatctgccgtcttctctttcaatagtaagaatgtgcttggtgaattatcatttggtaaaaattggtataaaaccttgaattccataaaattatggatatgatcccattttgctgtttcattggtggtaactcctagataaactgaccatatagtctcccccaagaaaaatccaaccagtggaaacaaaagtatgcataatagaaacataattcccgatatttcattagtgaaagttgaatttttaataagtctccaatacttagtaacaccacttgaagtctcaacaatttttggaagtttttctaatttaatgtacatcatcaaactgtaatatgacaagtaggcaccatatatgaaaacaaagcaaactgaacataagaaaataaaaaaccaacggaaagtgtaataagcaacatcattatttaaccagatacaatggtgatcaaacatcaaaatgcatctatcacagctaccacaatgtttacttcttgcaggcttaataactttgcaagttgaacagcttttgtctttaaagaaaagtagaccatcaaaaggaaattcttctaacaatttaacatattgtgttctatcatatggtttctttgtatcaatatatccaggatctgataaaacagccaacaaaaataaaagatagtttatagcaattgcaggtataatgacaaaatttaatctaatactccagtcaaaccctgttttagatagcttttcaagcttcaatatttgtggaaatgtcagagtaaaaaagaattgaagaaatttagtaaacacagctaaataaaagacaggtattatccagcctgaaatccaacgtatcctcctctttgattgtttagatgtgaaaaatccattaaggtaattcttatcaatgatttcaaatttctttgcaaactcattgaaaattctatcaactaaaataatgtgtgatctatgtaatattgtgcctctgtaatttggtaaatcaccaatcaatacaatcaataaaattaatgtcaagaatatcacaagcgtgacaagtaaataaaaggttgacattgagtttctatatgatcatttgcatggttttcaagaaagaaaaagaaacataaagataagttgaacttttattcagatcaacttagagataggtggaaattttatttacaaaacagcaaaaaaaaaaaaaaattaacaatgaaagctgtggggttcgaacccacgcctccgaagagaccaggaccttaacctgacgccttagaccactcggccaaacttccaagttgcctttttttgtttgagagaaaaaaaatgttatccattatataaattactgcgccgcaaagtggctgatgaaaaaactatttacaatttataattttgattttgctaaaaatatttttaataatttaaattatcaatactatagttttttgaaataccaaacgaaaaaggataaaaatgtttaaaagtattatttattttgtggaaataaacagtctttaacaataaataaaacgtacaataaaacttagaaaaataactattttttaaactaaataagtatttatgaccgtttttgactataaaattacacattttctacttttcttggctttttttggaggagtgtttgagtttttagctacagatcccttagttgcagttccagaagtgttaccagtaacaggtctagacatttgagattgttgtttttgttgaactggaacattttgaattggagtttgttggttcttttgttctggttcattaattttttgtgtttgtacttgttgtttttgttgttgctcaacttcttttcttaaaatctgtctaacaacatcaataaatgcatcatcaacattcattttatacattgcactagtttcatagaaaggtactttattccattgtttagagactgcaataccttcctctggttctaattctctttcatctgctaaatcacatttattaccaatcaaaacaataggtatatttgatgtacccttaatacgtataatttgttccctaattgctagtaattcttccaatgacttcttatcagtgacagaataaactaacaaaaacccctgtccgttctttatatataattctctcattgcagtaaattgagcaacacctgcagtatctaaaatctctaaattgcatgcacgtccatcaacttcaatttcctttgagtatgaatcttcaatagtgggatcatatgtatctatgtaaataccttgtacaaattgtactgttaagcatgatttaccaacaccaccggcacccagaacaactaatttataatctgtttaaaaaataaaagtaaaattaataatattgcatgttagtaatcatcatcagctgggttaatatgataaatttatatcggatataaaaaacttacctctcattgtatcaattgtgcttttcactaataagataacaacaaaggagagagaagaaaagctaatttaaaatatggacccccttacaatcaaaaactcttctgcatgcacttgatctggacacaacagtgaaaaaattacctgcgaagaaaatttacgtgatccgaagaaaataacacgataagaactaaaacatatagattacaataacgttagtttagctgatagctattcatataaatataattagatagatttaatttgatttgtttatacagtgtaaataattaactagaagtaatatatctattgagttttcttttcttcaattgatttttcagtcttatcatcatcataggttctttctgcaatatcagctgccttgaagtccataaagaaatgttttaggacaatttcaattaaccatgcaataccaaaatcaagtaacatagttaatgttaatttaattttaaaaatcatatccattggaacaaattgcattgcttcatttaattcagggataaactctgttgatcctgaaatacataaaaatgcaacacctagaataccataatacatacccttattctcatgaatcgattctctaaatggtctaccaatataattaattgtgaatgtactgatttgttgagataattgaattaagaacattgcagtatttaataatgatggttggaaagttttatctaaatcaatttgtggttcacgtggttctaaaatgtaaatttctttagtaatatagataagtgcaattaaatgaattgcaaactgacctaaaattgatcccataatataaatattgaaaataccaggttgaggtctttcctttgataatttttcaattgacttacctcttgaaatagacataaaacaaacagataacaaaacaccagaaactgtagcttgtgcatcaccaaatttaataccagctaaatataaaacagataaggaatatgcagaaattaaacaattcaatgctaaaatcttatacatttgaatagttgcaaccaatgcacatctaccttgtctaataacgtttaaaacagttgaaacattagctaatttagaagtaaatggagcagcaacggaagcatcacctaattttagtactggcgcttcttcatcttcttgagattcttgtaaacttgctaataaagattcagtaacattgttttgcttattttcagttgatgaaacagttggagtagcagcttctgcaagtttattagcaagtgcaactttttctctaatttcatcagtaataacagtaccatgttgttctaatgcctttaaataatgtggatttaatggtccaggtggatgtaaatgagcaatttgaacaggatactttggttgtggttggttccatcttttcattaaatcacattgtttttgatacattttttcaaaactttcaatttttctattttcttgcattttctttaaagattcttcagtaccatttaataatgcaataccaacatttgcttgtttaagagcaccaacatcattagtaccatcaccacacattaaagtattataacctaaacctttataagtatttaaaatatattccttttgagatggtgaaactcttgagtaaatccatgaatatctaattaaagtctcaatttgtggatgatcaatcagttgttcaagtgcataaccagtaatacataaatcattttcctttaagaatttcatatcaaacgtaatgtctttattaacaggaataactctagtttcattaacatttttccattctaatgaagaatctcctgaatgatttttttcaggtttatccagaattaaaacatctttagtaataataccaacttcctttgcaacatgacaagcagttaatggattatcaccagtaatcataacacatctatgagaagattgatttaacatttgaatagtttcaactgcatcacttttcattggacaatggaaaacaataaaaccaccaaaaatcaaatctttttcaactgaacttctttcaattttatcaagatttttatcattttctaaatatttataagctaaagctaaaactcttgatccattcctagtgaaatatttataagttgattcataatctgatggaacatcagttaatctttcataaatagtttctggagcacctttacaaccaaccaaaactttattattaactttggaaataacagaagatcttttcaaagatgaagaaaattggaatcttttcagaatttggatttttttgttacttggaccaatcatttgatttttaattttatcatctaatttccaaccagagactttaacagtttccttttccattggatcaccaacaacttcaccatcatctaacttaactaaagcatgaacagaacctaataaatcaattgtaacatctgggacttcctttgaatcacatttagataaaatagtttgagcatttgagttgaaacctgctaaaccttcaaaaaataaatcttcagcagttaaagtaccagttttatcgaaacaacaaacatcaattctaccagcaacaggaattctgaaaggttcagtacaataaatataatgttttgctaaagcagctaaagattgattaacagccatagttaattccattggtaattctggtggaacaacagaagttaaaacaataatacaatcaagaattaattttgattgttttctacccattttagtaccttcaatccaaacatatcttgaagcaataattgcaaaaactaataagaataaaataaagaaaaaagcttctttattagcaacagacattctttcagatgagaaaatcataactctaactaatgaaccttgagttgtttcaaaacctgttttggtaacaacagcaatcgcaccattgtcaggagctacaggaataagagatttagaagttgatgaatttgtacttctttcaggaggggtaacttgtaaacatgaagtaccaccatgtaataaagaatttttatctaaaccatcaggttgaaatgtagaatcatcttctctattttgaatactttcttttaataaaggagttgattcacctgataacatagcttcattaacaatacaggaaccttctaataagaacatatcacaaggaattgataaatcttcatgtggagttctaacaattgagacaacatcagcaggtaataattgatcagttttaatttcactccattttttatctctataaacgtaaatatcataaggtttaatacccatactttgaaattcagtcattgttgattttctttgataaacacttgtagcttcgaatgaaaataacataattaacgagaagattgataaataccacatttcatccattagccataatgatattgaaaataattggaaaacaaagaaaggagctaacatatgttcaatgaataattcaacgaaagttggaactgggatatcaaaagtatttaaaccataataagtttgcataccaggaataatattacttgaaaaacctgaaatccctttcaattttttgattgttaatttttcatcatcaatgtagaattttaaaggtgaaaatgttttagattcaggattgtataaaaattttcttttttgatatttgaaggtaatttgatggcttgatttttcaattttacaaatttcactcaaaccaaaagaagcttttgccttcattaaaatataacaagaggaattgaaatctgaaaatgaatcaactttattatattggaattgaacttttaaatctaaattccatcttggtaaaagccaaattaaagcgtgagttgaacataataataaagaatagataaaagtccattctttacccttgaaataaacatcataataattttcaaataaataatagtaagcaggataaactataaggaaaggccaaacgtaaggtttaaagattgttgattttggaactaacaactgagagtattcgatagtatcagtatcgacaattccacgtataaccaaaccttttggatccaccttagattgagcagtggtagccattgttaattaatgaattagaaagttgtaaaaggattttaaagtattataaaataatcaaaataaattaaagttttctgtttaagataatcaacgtgttatctttaaaaaaacggattttcaagtggcaaaaaaatgaagggctacatttttcatgttgaatttgaagaagtggacgataatagaagggcgcgtttatttgatatctaattacgtaagattcacaatatattatgagctgaacgtattgcattgacaacttcctgtggtgatttacctcttaattgatcagcaatgattgaacaaatagaatctatgagtggttctatatcaagaaaattagcggcaattaataaatcttgtaaataagagctatccatattaaggaaatcacgttcccaattatcgagtattggagatgtttgagtacttatatactcatcaagtgaattatctgaccaagtacccgtagggatattattgtaactcttagatgattcattactattatcattattattattaaatgctttattagtttcaagataatgattgcaccacgaaataattaatttcatggtttcaggtgtaatattatcaagtgggatatcaattgttggacttttaccattggcagtatgtttattcttattcttactctcattgtcactatcactttcactatcactattatcaccatttacctcgaggttattaattaatttggatatatagccagaaactctaagggtattagcattggaagtgagtttctcaccatttgcaaacaccaatcttactgtagacattgttattatatgatacagaatgataatgaaaaaagataacaataaataatatactattattaactacgcataggcgtagttaaacatttcccttcgggaaatatgcgaatccctacttataacaaatttataatcttacgtaatctgaaaaagagcttttttcaccaaaaatcacgacacgcgttttgttgtgggctcaacatagcttttacatagtaatttagctgaaattgcgtggcaatatctggcttcccacagaatagctacaaacaaaccaatggtaccattggaaagagaaaaaaagttattgtggtcctacagagagacatttcaagatttgaatcccaattttctaaaaatcaaaaaaaagtgcccaaaaataggacaaaaaaaacactaagttcagcaaagtttttttaaatcctaaacgattggtaaacaatatgttcattcagtttccagtacaaccaagagaggagattacaatgacctatgtccgaagtgctcaaggttaatggccatcttacaagactttgtcaaaaaacgcaaatttgaaactaaaaacgttcataactcagtcaatagttactggaatcaaaaactaagtacatgattggatagaggaaaagcgcggctacaaatgtgatatttatgagatattggtgagggggaaaccgaagacttaggttttcggaaaattttcttaaatcgctaaaaaacatattataagtagggatattatataacgcaacccttctgtcctactgtagtaataaattcatcagtaaaaataatcattataacttgccaagcctccaaagcacgtgacatgttttaaaggcagctcacgtgacattgcacaatattattaaaaaaattattatttcaaactccacaaaattttaaagtaaattctccgtttagtggagagcaaaacttcccttttaggttatcctgtagatctgttttaatagtttgaactgtgcaagtttcaatcaatcttatattattgtaatcttataccagtgcccaatcttatattatttggatcctttcaatcaaaaggctataataatgcgttagtaatacccgattcattttactacaatgttattaatcagcatcctatgatttgtatctgctttgtacttgctttttattaaaactatatcttatttagctcttattatttattgtaatctattcattaccttaatatacaaccttcactacatattgatgccattatcagctacatcaacaccattaccaacatctattgatctcagaaataattcattttcactaaatagaagtcgtaatacctcaacttcttcaacattttcaaatacttctcatacatcatataaatttaagacaacacataaggataaaactctatcattacaatatgatataactactgaaaataataaaattaataaatataaaggtaaaataagatctttagaaagtgaaaatgcttggttaagaaaaattctattatcaaattgggatactgacttaattgattcaatctcaaatagtattgattatacaacttcaaagcatgtataacaagaacaaccgtctcacctctcaatacccaatatttttatagattctaaattgtataatactttcagaaaaactcttcatactaattcacatattcaatgtaaatagttttattaataatggtttaattagaatgtgctataaatctagattataaatgaaagaaataaaggaaataataaaaatattagaaataattgtagataaaatgaaataaaataatgtaggtataaaaatgaaaaaaaaaacacattctttatgaaaatccaatcaatgtcacaaatttcaaacttgttcaataattggttcaatattccaaatattttcagcatattcttcaatacaacgatcagaagagaaaaatcccatatttgcaacacttaaaactccctttttaacccaattttcatggtctttaaattctttatcaattgtactttgtgcttcaagataactttcaaaatcatctgaaactaaatagtaatctccatggactttagttgaatcaattaatccttgatattcaccataatctccaaatgtacccttagataattcattgaaaacaagtgttaatgcatcaggaatttcaattctacccatttgatgatcatatcttaaatcttcaacatcttctgataaattaccaaaaaggaaaatattatcttcaccaatttctctagtaatttcaacatttgcaccatcaactgtaccaataattaaaccaccattaagaacaaatttcatatttgatgtacctgatgcttcagtacctgcagttgaaatatgttcagaaatatcacttgcaggacaaataatttcagccttggaaacattataatctggaatgaaaacaacttttaataaatctccaatttctggatcattattaacaacttcaccaacagaattaactaatttaataatcttctttgctgcataataacctggtgctgctttaccaccaataatacaaacttttggtaaccatttagcttcacgttcttcctttggtgttgccttaatatgtaaatatctccaaataataccgaaaatattcatttgttgacgtttatattcatgaattctcttaacttgaatatcaaataaattatgtggattaacatcaatattagttaatgatttaattaatttggataattttactttattgttaaatttaacttcatcccattttgataagaactctttatcattaataaatgattcaagtttctttaataagactggctttgttaagaaatcatcactacctaatttttcgctaattaaattggttaaatttggatttgcttgttttaaccatcttctaaatgtaacaccatttgtaacatttgtgaatttttcagctccataaattttaacaaaatctttaaaaattgttgttttaatcaattctgaatgtaattctgcaacaccattaactctatgagatccaacaattgctaaatttgccattctaatattttttggagttgattcctcaacaattgagacccttcttaataaatctctatcatttgggaataatttttcaactttttgtaagaaaaataagttaatatcataaataatttctaaatgtcttggtaataaattaccgattaaatcaactggccatttttccaatgcttcttgcataactgtatgatttgtataaccaaaagttttagtaacaatatcccatgcataagaccattctaaattttcattatcaactaaaattctttgaagttcaacaactgctaaagttggatgagtatcatttaattgaattgcaactaaatcaggaaatttatcccaagaatgttcagttttcaaaaatcttctaacaatatcatgtaaacttgctgcaacccaaaaatattgttgttttaatcttaattctttaccttgataaaaattatcatttggatataaaactgcagtaattgattcagctctttgttgttgagcaactgaatcatcataatcaccttcattaaatttttggaaatcaaattcagttgttggttgagatgaccataatcttaaattattaacattatttgttttaaaacctggaattgggaaatcataagcaattgctaaaactctttcaccacctaaccattctttctttgatttaccagttttactatcaattgttgtttggactgtaccataaaaatcaattggaattcttatttctaatcttggaatttcccatggattaccaaatttaagccaataatcaggatgttcaacttgataaccattaataattttttgtgaaaaaataccataattatatcttaaaccataaccccaaccaggataattaccagttgataatgaatcaataaaacatgcagctaatctacctaaaccaccattacctaaacctgcatcaggttctctttcaataatatcttctaaattaaaacctaattcatcaacacttttcttacataaatctttaacatttaaattaatcattgcattatctaatgctctacccattaagaattctaatgataaataatataaacgttttgtttctttaattgtatataattgttgagttttattccattgtaaaattaatttatcacgtaaactatttgataaagcttgataagcagctaaatcatcacaattatacattgatcttgcaagtgttgtttcaacatgattaataaatctatcctctaattcttcttcattagtaaaaccagttgtggcatgttttgcccacgcagttctacatttaacaggaattgaagcatcaatatttttaatttcagttggggtaaacccagtcattgtacgtctatgtttacctctaacaaaggcattggagtcaattgaaggcatcatgattactagagtattaacaatgtctttcttggttaaaagaaactaaagggaggtaaagaagaacaagttataaagaattgaagaggaatcaatagtcagcccatccatttaaatacaaattaatcaattaatttattgttatcaattcacatacagccactccgaaaatttaaattttgacatccggcgctatcgcatctcctgatacccatttatattacgtaatttactctattatatcctatattctattcttctactctatatacaatactaccatcttcaaatactttaccctttacatcgtgtaatccctctccagaataactggttaatggcgatacttcaatgagagcaccctctttaacttctcctccattcgctatgatccatttagtacttcttttcagacaattcatacgacacatctctggtgaatcacttggtgatccaggtgcattctttaatggactaaattcatcctctcttgcaacttctaaacatccaaacttatttaataaaacacttggaaaaacatcaaaaatgaactgctccattttaataccattaggttctgtaggttgtataaatttattagttgtagtatcaatacatgatatcttctttttagcaatatgatatggtaaataatttcttgaattaatccattctggaaccatcttctctaaaaattcaactttataataatgattgacaatatttgcagcccttaattttaataattttggatcatttgaatcttttgattctgctaattcattagaaatttcactatattcaataacacatggaacattgttggttttatctagtacaattaatccaactttctcacttggttcattttttctaacaactttagttgcaacatcaaaattattaattgctgaatatccaataaataatggatctccaacttttactaaaatattatcaatacaatacatatgaatatgttctatccctcttgatttgaaatcttctaatattgaattatcatatagtgctttatataatccaccattcccatcaggactctcgactaatgaacatttatcttctgcaagtaataattttttaccttcaagatcaacagctggtaatgtaccttgattgaaaaatacaatttgattttcattccatccaaaataatcattttctttaaagaaatcttcagtattcttacgtgtagggcctgatgtcataatatagagtgttaacacgttatgattattttcatctctatttgctaataattctaattttctcattctttccacttgaatctgaaataatgatttatgtgatggtaatccaacatcataacatcccttaggtgatgtagatccaagtcttgtaccttgaccacctgccattaaaataataccaactttaccatttttgattaattctaaacctttactttcccattccaacaattgttcagttgatgatgtaattgttgaattgaatgatgtttcaggtaattgtgtatactctttagcacttgaaatattagaagaatattcaattgcatttgaaacatcatttataaatgattgtggatcatttattttagataattgatttataaaattattttgttgagtttgatctaattgttcccaatatttgaaaatatgagattgacccgccttttcatatttctctctaataacactactcatttgttgttgatgttttatataccccaatacttagcaaatgaaagtaaattacagaagaacaataaccaagaacacgtaaaagtcctataattttgaaaaggattgactgtttttctcccccatgcgttgctaaaatttcatgaaaccagccttgttattgaaatgtcaacaaaaaaggcctaaattgacggatcattactatttttaatttaattcattaaaaaatatttacaaataagtaattgtttactacttttatttagataacttctcaatgatgtaattagcctctctttcaccacttatatatgcaccatgtgcacatgaatgaccttgataaactggcccttcacctgcaaatctaatactaccaaatccatcaattaatgcatcattaacgaatttatcacctggtgcacatgtactgatagcacctcttgaatatggatcattaccccatgatgttgtaagaattaatttaggttcaggaatttcaatatctttaccaacaattttagaaataattggtttaattaagtcataaccatatttttcaggatccgatgcattttcaatttgatatgctggttgtgatggtaataaaaacatcaatgctggaatttttctaacagaattaaaattagaaactaaacatgggaaatcaaatgctttaacattttccttatcagtatagttaccgaactctttaacagtttcataagttttagtaatatctaattcatcatcatttggtactgataaaactaaaaatttatcattatcaggccaaaaagctttatcaaattcaacaataactttagcaagtggaagaaatttagtctttgcaaaattatcagtaattggctttggcaatggtggattgaatgtaattgcaccttcttcattagttttatcaatagataattttagaacacctaatggaattgtaacaattaaatattttgatttgtaaattgaaccatcagcattagtaactttaataattgtttcatcagccttaccaacttgaattttttcaactgatttaacaactttatttaataaaacattatcattagggtaaccttcaattattttttcaataactttatcataacctatagtattaaatgcatctctaccattaaatgggccataagaaaatttagaaccaattgtatcccaatcgcaaccatttaataattcagcaaatttaaataaagcagtagaatatttaatttcatcccttgataaacgatgttgtttagttttaaaatattcaattgcacaattatgcaatgaaatatcatccttcaaatttgatgaataatatttcatttcatcaacaattgcaccaacattaataccactaggtaatgagcctgtttcactattaataattataccaacattattatcatcatattttgcactttcaatttgtgaatttgaataccaattatttgtaaatttatcaaaaattggattttccattgttgaatgaaaccatgatgcacctaaatcataatgattaccagtaactgtatcacgtttagtataaacacgaccaccaattcttggtcttgcttctaatattaatgattttaaaccttttgagtgtaatgtagatgcggcattaagacctgcaatacctgcaccaataattataacatcggtatcaacttctgacattgttcaattgaagattagattagaaaaaaaaaagagtgttaattgaatataaaaaagttccataatattacagtcaaaataatcgaaatggggcatgcaagggagtgtaaaaatcttcacttagttacccaatatttcgcgcttagttgaagaaattgaaaaattcacttgtacgtaatccattccatcccaatgtattatgatgtttacgtaagcccatactaattactatgggcttacgtaaacacgggaagctgttgtgttggaatggattacgtacaagtgaatttgattacttaattaaataagcgcaatgattacgtaaattaactaaaatttccttttgtatattaactgccccaatcagattattttgactgtaagtgatattcccacaataggtaatcgtacaacaatccgattattaattttattatcaacaaattaatgttggggaaaatatacacattttaggaaaaaataccgacttaccagtactagatgtttaatagatgtttaataaattttaagagtaacgataaatgtaatacgagttataataaagtaattatacaataaaacaacaaacagtatattgcaagattaatgagaacctgcacctcttgaaactttttctaaaactgattcataagaaacttcagagaaatcagtaccttgaatatcagttgagacaccattaagagctcttcttaaagcatcctttgaagatgcataaaccatctttgctctaattgaagcagtatcaggagaccattggaaaaagacaattttagatcttttaccttcacctgcactaatttcatattcaaaatcataaacagcatatttacaatcattttctgggaattcttctaaaaatgcatcatatgaatcattagttgaagttttgtcaacaacaatttgagttttatcatcacttaatttgtaaataacgtatttatattttttacctaatttaaggtcattaaaagcttttaaagcttcatcagaaattgcaacactgtaataataaaggattaataataattaattaatgttagtatgacttaaattcaattcactttattggggtttattggtttacttcatgtttgaaatataagattattaacatacccagatctagactgtacaagtacaataaaggaggtaagataattgatgagtcaaccaatcattcattcaataaaacatcaatttgattgatttcaaacatgtcatcaaattatgaaatgaaatgaattgattatcaatcatcattagagccattgttgattcaatgggggtataatatgttagtatttattcagttttaatagttacagacatccaatatatatagtatacatatacataccattatgagttaattgttgattaagggaaacaactaaaagaagaaaagggtgggggtggtcagacaaactccaaataatatacagtaatccctatatgttttgccactgtcagaaaaactcaacttcgtcgctgagaaaatgaaatgagatagttggctttatctgataagtattattattattatataggacaatgagtagtgatagtagatgtagcaatgggttgtcgttattgaaaactcgtgtctctgtgttggaacagatttggagtgggttttctgctgatcaattggagaatcccgttttattaaaatatccacttcttgctacacatgtagatgatctctgtaagttacttaatcaatgtcatgttgatgatattagtattactacagatacaaatgaagtcagtaatgataaagataatgaaaagaatattatattggaaaatagaacattattagtactaatcactgcacaagctgaaaaacttgttgatgattgttcaccattattagattctttattaatacttactaaacaacttacaagtcaaaatgtgaataaagaaatttatttaaagagatttaaaagactatacgatcattttaataatatagtacaacgattaacactactcatacagaagagaatggttttaagaagtaaaatagctcgtgaattatagtcgaaagagaacagaacttcaaaaacgcaattttcaccaaagttacatacaaattgtatttcatacaattaaaacagagtctcaaaaatagcgtgttctgtaatttgaaatcacataataagttaacattttatcatataatgcgtattttaacaggagtcttgtaaaaaattctgtaaaactgtcagagggtggtgttacaagagaagaaggttgatactgtatattatagtctataatgttctataaaaaaaggttcctatacaataactcctgatccgagtaacatatcatctttatacaaggccaaagtttgacctggtgcaacaccgaaaattgattcatttattttaaaacttactttaccattattattatcatttactttaatatctaaaactttattaggttcctgtaatgatcttatttgacaattaatattattattatttttattattatatttatcaataagtaatttttcaaatgataaacctttttgcatccaataccaatttttttcatcaacattaattaaatttgtataaaatgcatctttatcatctttcctagaaattattaattcatttttttcaatatttttaccactgactaaccaaactcctttatataatggattaccttgaggcattgaaatacctgatttttgtccaattgttgcactccataatccattatgtttaccccaaattttaccatcttttgtaactatattaccaggatttggtggtaaaaattcattaagaaaatctttaaatttcccaatttgtgaaacaaagcaaagtccttgagaatcaggtttatcctttgtaattaaattataatctttagcaatttctctgatttcaggtttactataatgtccaattggcattaaaacatgattaagtatattatttggcatacttgtaagataataactttgatctttacatttataatcagctctaaataaattaaattcttttgtttcattattttgaagtattctactataatgacctgtaactaaccaccattttttatcattattcatattcatattacaattattgaattttttatttaaatattcaatcattttaccaaatttaacatatttattacaaccaatatcaggatttggtgttaaccctcgttgatattgatctaacattggttcgaaaacttgagtccaataatctttttcaaaattaactctttcacaaggtatatttaattgtttacaagtttctataacttgtaaccaatcatcatcaacagtacatttactatttgaatttataattttatcagaggaccaatttgccataaatataccacgtacattcttatattttttagcaaacattaaagcagtaacagatgaatcaacacctgaagacattgaaattataatttcatcattttccttaggcataacttgagtgtaaccctctatagtggtggttttaaagaacctactatccactcccacgctactataccatcttctaaacgatattcctctcatcatcattgtccactgtccactctcctataaaccacacatcacaaaaaacatgtcgtgaaaaattagtaatagaaagattaaaaaatttaaacctcgcctgactttaaagattaatagaataagcgatggtggtggtggtagtagattgtggaagtgttgatttaacttactccttatatagtggtttcttttatttatttctttatctcttcttcttttattaactcaattgattatattaaaaacaatgtcatcttgtaaatcttctaattcttcaaataaatgttgtggtggtgcttgtttaactaaaaatagttgtaatttattaacttgggaaaatcctaaaaattctgcaattgttttatcatcaattttatcatcattattattaattaaatatgttaatttattagcattatttttccgtttatcaacttttatcttattattttcaggtttagcagaatatttaggtaaatcaattactggtacaggtttaattactaaaattaaatcatcttatccaaaatttaataataaaaattttattggagattttgctgaattttatgctccacatgcagttacaattttaaaaaaatttgaaattaatattaaaaatttatatacttcagttaatattgaaaatactattaaatcaggtgttttatcatattttatttataaaattacaaatattttctcaatttggactttatgcttcatttcaacaattatttcatttactgcaccaaaaatttatttattaaataaagaaattattgataaaacaattttagatttatttgaattattaaaagttaaatttaataaattatcaaattcaattaatgaatcttatggtcctcatattgatgctgcaaagaagaaaattactccaattattaaattaattgaatctaaattaccaattagaactgcaggttcaactgttaatgaaccaattattgaatcttcatcaactaaatcaactactacttcatcaaatattattgatgaatcttcaaatattaaaaaagttaatcaatcaattaatgaaactgaagttgattttaatgcattaagtgaacaattaaaacaagatgcaattaatgcaactaaggaagcagatgttttcactagagaaaaagttgatgctccagagaagttataattataattatatgataaagataaattcttctttttttatcccaaattctcccttatttcttatttataaatgatattactttattactttataactattttaaatatattttttttcacaattctcctttattaaataaattcaattatcaaaacttattcgatgggacatgcatagtgcatttttaacatgatactttcactagctgcaaattagaatgtaagatagtatagtaaatagagattaattatatagtaggttattatatataatggttataaatttgattagatatatttgattagatagatttaattgatattggttgataaggtgtatttaatataatataattataattacataatagtacaacaaccaccaccattttcctttgcgccagcgcttggttttgaagaagtgttttgaacatattgtttattattattctcttttgaattatcattatcagaatttatcacattggatgaagtattattgttattgttaatagtattagtgttattttgattatcagtagtatttgtagtattgtttccattaaaggatgaattaaaattcttattattattattattattaatattagtattatccctagtattcatctcattttttgaattttgttcaattaattttttctttgattcttgagcttttaattcttccattttatttggatataaagtattttctaatccaatacccattaaatcaccatacataaccattttaactaaaccatgaaatgcttcaacaacatttaaaccagttttagcagaagtttcaatataagcacaattaaattttttagctaataaaattgcttcttcatgagatacttgtctttcatcaattaaatcatttttattaccaactaacatcatgggcacaaattgtacagtttcacctttaactctaataatttgattataaaaagttgaaatttcttcaaatgtatgacgatcagttaatgaaaaaactaaaaggaaaccttcaccagttttcatatataaatctctcattgaagaatattcttcttgacctgcagtatctaaaatatccaaagaagcaggagtattatcaatattacaataatatctataagaatcttcgattgttggatcatattcatttgcaaattcactttgagttaatctgattgttaaagcagatttaccaacaactggtggtccaacgactactaatctaaattctttagcaacagatgacattatcaattatctttcaactatgttttttataatagtaattgatattataaagagagaagacaaaagatgaaagaaaactagaaattaaaaataaaattaaaattaaaattaagaaaacagaaaacagaaaagtattctattctattctattctattctattccattacagcaataatatttttctttccattatattatggacaaccttagggacaattttaattccaatgactttttcactctttttcactcttttttcccttcgacgcgccgccttgctgttttaggaaattttatttttttttctgtgggagctttaaattatttaatttttttaaaaattttatttttttactactgaaattttttttaatctctgttctgatcttatagtaactgctttaaacaatggcaaagactggttctaagagatcggctgttggttcagatgatgtttctttgaagaaacaaaagaaagattcaaaggctgtttcaaaaaaatctgataaattaactaaatcttcaaataaaattactttagatgctagaaagcaaataaaagataatcaaaaggaagaagatagtcatgatgatgatgataatagtgatgatgatgaaaatactgataaaattgtcgatgatttggataatgaatatggtgatgttgcagatttattagaaaaagctgacgataatgatgatgataatgatgatgaagatgaagaggaacaagatgaagtagtagaagatgaagatgaagataatgatgatgaagataatgaagatgaagaaaataatgataatacaaatactttggatgaaaaaataccagataatactccacttactgaaattcctcaaaattttactgatttagcattatctgctccaactcttaaatcaattcaaaaaatgggtttcactaaaatgactgaagttcaatctcgtacaattccacctcttttagctggtaaagatgttttaggtgcagctaaaactggttcaggtaaaactttagctttcttaatacccgcaattgaattattatattcacttaaatttaaaccaagaaatggtactggtgcaattgttataactccaacaagagaattagctttacaaatttttggtgttgctagagaattaatggaaaatcattcacaaactttaggtattgtaattggtggtgcaaatagaagacaagaagctgaaaaattaatgaaaggtgttaatttattaattgcaactcctggtagattattagatcatttacaaaatacaaaaggttttgttttcaaaaatttgaaaactttgattatggatgaagctgatagaattttagaaattggttttgaagatgaaatgaaacaaattgttaaaattttaccaaatgaagatagacaatcaatgttattctctgcaactcaaactactaaagttgaagatttagctagagcttcattaaagagaagaccggtttatataaatgttcatgaagatagagatttttcaactgctgaaggtttagaacaaggttatgtggtttgtgattcagataaaagatttttattattattttcatttttgaaaagaaatttgaaaaagaaaaagaaaataattgttttcttttcatcttgtaattgtgttaaatattattcagctttattaaattatattgatataccagtattagatttacatggtaaacaaaagcaacaaaagagaacttcaacattttttgaattttgtaatgcaactcaaggtattttattatgtactgatgttgcagcaagaggtttagatatacctgaagttgattggattttacaatttgatccacctgatgatcaaagagattatattcatagagttggtagaactgcaagaggtagttcaggtaagggtaaatcattaatgtttttaattcctcaagaattaggatttttaagatatttaaaagctgctaaagttccattaaatgaatatgaattcccaatagataaaattgcaaatgttcaatcacaattagaacaattgataaaaaataatttttggttacatcaatctgcaaaagatggttatagagcttatttacaagcttatgcatctcatcatttgaaaactgtttataaagttgataaattagatttagttaaagttggtaaatcttttggttttacagttcctccaaaagtgaatattacaataggttcaagtgttacaaaatctaaaaagaaataataattcttatatcttgatagtaatagtaatagtaatagtaatttaatttaattatatttttattatattgtatataagttgaattataaaattaattgtaaatattgtactgtatattttgtaagtatataaaaactgaaatttgttgaaatagaaaagaattaaatgtaaaagtgaagaaataatataaaattaaactaatttcttcccagtaatgttaaaaattcatctcttgtcttttgttgtgatctaaaacatcctaacatacaacttgttgatgtaattgcacctgatttttgaacacctctacttaccatacacatatgggttgcttcaatgacaactgcaacacctcttggttgtaaaatttcacttaatgcaatcgcaatttgttttgttaatctctcttgaacttgaaatcttcttgcatacatttcagctaatctagctaatttacttaaacctaaaaccttcttatttggaatatatgcaatatgacatttaccaaaaaatggaactaaatggtgttcacataatgaataaatttctatatctttaacaataaccatttcatcatgatcttcttcaaaaactgctcttttaataacatctttaatattatcttcataacctttagtgaaaaatatcattgctcttgcataacgttcaggagtttctaataaaccttctctattagtatcttcacctaattctgttaaaatagttctaactgcattggcaattctagcttctctacctaatgattcttcattgttggattctaaacgttcacgtgcacctaaacttggccatgataaaccatcagaatcaattggaggatttaatgtataaggagatgcaggtctagtatttaatggaacaccagaaagttttttataccatggttctctttgaggttttggattagataattcttcaactccttcaccttgttgaatattttcttcaacattagtttgattgtcagataatttcatagttttaagtttagcgtcaagatctctatccatttgatcttttctatacataacagaagcctgataaacaaacaaccaaacaagcaaaaagtttaaaacagatgaaaagttcaaagagtcaatttttttcatgatgataaattaaccagtaaataatttgaaatttattctctgcgtctttttacatttaatgtagttattggcatgggcattgcatgctttattttattttactttactttattacatagatattatacgtgtgtattatgcaatataagtatcagttacaatatgtatacactgtttaacaactgtgctgtcatttggatgaaattcatcatccttattaccaaaaattcgtccacttatatttaatataatattcttattagattcctctgacattactttacctatttgtgaagctaaaacttgtgtctttatgttattaccagctccaattaatacaattggaacaattgtactcgtagatgaaatatcatcattatctaattcattatctacttcattatttaaatcatctatttgatatggccttttgaattcattttgttgaggtatttgaatatcatatgaaatatctgtctctccatctaatgataaatttattatgattttatcttgaaattcaagaattgtacatgtcaaaatattttcattaccatcttgttgtttaataattaagttagattccttaactgtattgctaaattctcctgtattagacataataaattttttctacacttgaatctatacattgataataatgataatgatacaactaaatttaattacttactatacctcgagaaaaaaaataattttcccacacattgcactaaaaattaaattataacttgatttcaccttcttgaataactgctgaatcaactaactctagcttacctttcattgatttaaccttttcacctaatggtttataattctcaggttctaataaaaataaaatttgtgtattatcatcaacaatttcactattttcaagaaatgaaatgaattcattctcaaattctgatttaactttattaaaagtttccgtatttaatataactttaacccttaatttagctcttgcaattggtatgatttgcttttcaactaataatttaatagcttccaatgattttgattttgcacttcttgcattaacaaaattaaattttaattctttaagagctttatcaatcattgttggtggatatcttttcttactctttggattgatacatttagctgatattatatttagaatttctttatgtaatttttcattttgttgagctctctccttctcacttaattgaatttcacccttcttcaaaatttcaagtataatttcatcaatatttgttgtattaaatgatgctttcaaatcttcacttgatgcaatttgacccttggaaacattaagaaaaatttgaggaatttgtaaaacttcatcaatatttttttcaactcctgattggaaatcatgaactttattttgataacatgcaatttcaaatcttttcttaccctttttcattcgcacaagggaaacattagttagtctaatttgtgagtttggttgattgattttacccatttatgtaattgtaatttaattgtcacaagaagaagaaggttcttgaataatgcaaatgaattaagataaaaaaaattatttgtaagggaaaatttaaagtgtgcccctatataaaaacaaaaattcaaaaaaaaattataataaatattaggtcgtacccggattcgaactggggttgcccggatcaaaaccgagagtgataaccactacactatacaaccaattattagctgttaattttgctggttattttcgtcactaattttttgaggtcacgtgatttttaatttttcaaatattttaaacatttgttgaaaaattcaaaaatgtacaagaattttttatagctgttgttattggtaatatgaaaataattaatttaaatttaccatttgatcaaagttagataaataacaattcaaaataaagaagaatcaaacagttaaatttatcaacaaagcattttttaattatttacatctatccttagtgatactacatagataagaccccttaaagaatcaattttgattgagtttaccttactgtttgtgtagttcacaaaatagtattattgaaattggaatatcgaaaataaatcatgtagagattagctaaaggtcaaaaataatgattgtgaaattgaagatttaaactaattgttgtgataaacaaagtttcaaatttcaaaagtgactcagctttgttttcattggattttgtggttgacaatcttaaatcattgatgagcacatcttatatttattaatgcttctatttttagttagtatttattttacgccttggttcatatatgttttaatagactcttgttttagtcattaacctagattgatatatcaggttgataataaaataaagtgttcatttaactattacattaatacagtatcgttttagtagtaataaaaagctgtattcaaattattgaaaaaaaatatttatttggtagaatcactagtttagacttttaactacaccaaaaaggtcaattttatctaaatcttttgttatataagatagctacaagttaaaaatgcaaagatcaatgactaatatactataaacacaaaaaccaagataaaatattttgtaatgtacattgataagacttttgagctttcaattgtaaaatttctagtcactgtgctaaccaactagttactggttttcctaaaatatacaccgtgggaaatttttttaaaaaaaataagattctctattttttagttttacgtaagcaaaaattgccttttttcatgaacaaatgcgctatgtaattttagtaaagaaactcactttaattttttgaaaagtaaacaaaaaaaaagtgattttcaaatttcgagaatgagttttttcatgcgccgcatttacaaaatttttaatgcgccataaattccaaaaaaattgcggatttaaaaacgacgcgaaagataaaaaaattcggagataaaaaaaataaaaaaataaataattcggagataaagaaaaaaataaaaaaataaaaaattcggaaataaagaaaaaaataaagaataagaaaatcggaaataaagaaaaaaataaaaaataagaaattaaataattaaaaataaagaattacaatagaagataaagaattacaatagaagataaagaattacataaagaattacaatagaagataagaaattgaaatgaaagataaagaaaaatacaataaaagataagaaattgaaatgaaagataaagaaaaatacaataaaagataagaaattgaaatgaaagataaagaaaaatacaataaaagataagaaattgaaatgaaagataagagattacagtatttgtaaataatttaacaatctaaaacaaagggaaaagaaagggatagagtcaaaatttctgcttttgtaaaaaaattaggggaattgaacagatatttataacaaatcggttttttaacatccaaaaaaatttaagcgccggaagcttgtcaattttgaatccgattggctgaaaataatatttgtttgcgtcaaaacacaaaagggtttgaggttttttcaaagatcacgttttttttttttttttttttttacattaatttcattaaaatatacaattttatacagattgattacttatacgcatatattattaatgcttcatcaattcaatatatcttcatatactgaactaaatgtaaattatttctgtttgattattctcaatctttttcatctaatttagatctaataagaactaaatttttcatatttgaatagcaaatatgtatctttaatatatctttttgttatcctaaactctggatcattcttattgcttttgtagcattgtttgttaaaaaatataattaacttgattattatatttgctttataagcatctttctttgttgatattaaaccaacaatattttttagatcaatttttatttctaattcttttagaattatttcaattcctttacagttgaaaaagacatgatgagtcccaccttccccttcgcagaattggcaagggtgataaaaatgggaattcaacattcctgtttgtaattcaaataattcattaaaatcaacatggttttgattggtgattctacccaaccaaccaaagcatgtttcccaatccagttgatggtctagtttaccatcccaataatcagcattaaatttatttttaaattcttctttgtaaaatcttttagaaaagtgtttaaatgattcaacattgatttcctgatttttattgaaaatttctacaattttccatttttgaacatttttttctaccattgaaaataacgatgttgcattgaaatctgtagtttctttaacctgaaaatctgagtgaatattagttaaataataccatccttgtaaatatgggaaaatattagagtacaccattaatggtgctaatgtttttgaagaagcttcatccatgttgtaattcacagggtgttcgataatgaaattgatatttggttcaagatcgattattattttccctgtatttacatttattattttaggttttgcaacctttgacatttcatttgaaagagtttcttcaatagtaatattacttccccatattttatgatttttatgcagaagaagactgaacggatatgttgaaatcaatccatttgaaatagtgcctggtatttttatttttggtaaagttccaggtacagctctatttgatagtatgtaattttcaacatatttgtaataacaatgataaacgtagtgatttctgatcataacattaataattccttgtaatgagtgtgagattattaatgtcaaaggatgttcatttataaattttaacttctgtttaatagtcgttatataaatgaaatatgctcttctaccttgaagttgtttaccaaggtcgatcagacccatacccccatttttgtgaggttgatgccatttgattcttctaactgcaattttcagcggtaaatatttaactaattcttttttaacataattttcaaaagaatttaaaagaggatccggaattggatcatgttgatcaaaataatagatagtggaataaatgtaagtattaacagctactactctttgatataaatttagatctaaaaacatagttttccttagtcttgttttcaattggtttattttattgtaccagttgattttcaacaagggaattcctagatagataggattttctttgatatctaaaattgatagcttcaattgatttgtattagcaaattgtttgatattattgatacctttattattaataaaaattattgatttcttttcatttattttaagatccgaaatttgagcaaaattatttaaaattgatagtgattttaatagttcattattgttctggtgaaacagacatatatcatcagcaaaagctagaatattgataaaaagcttagcatttaaacctctctcattgtatggattgtatttcattcctctaattgattgatggagtttaataatcagtggttgtattgcaagattgaatatcaggggtgagaaaggtaaaccttgtcttacacctctccttaatggaatattaaatttatggatccaattttgattaactatattagccgatgctaacctagattggttaatagttgcttcaatagttgaattagggaacccaaatttttctaagatctttttaagatattggtgatcaatagaatcgaaagcttttttcaagtctactaataatatatgttgttcattggataatgatggtgatgaattgatttgattagcaagaatccttgcagtttcaatatgtaaatgaatatttctgtgaagcataaatgcttgttgatgatgggaaataatcctgtttgcaataggcattattctattagaaatagaaaagttgattaatctaagtgatgaatttgtaagactgataggacgtagatcatctattaatggaagatcttgtcggtaactctttttgggaattaattttatcaatactttaccaatcttatcagttgtggttaaattgccttgaagaatataatttgccatgttggttagaatcacagcagcagaaacccagttgtttttccaatctctgtaagtaataccatcagtccctggtgatgatggaccattttcatttagccttagaaggtttttatatatctcttgttttgaaaaaggtttaattaaatcatttttctctttctcagttaattgttctttaatattttcagtgaacttgtcaaatttgttatttaaattttgatttgaataaatttcatttgatgcgaaaagatttgaataaaatgaatttgcatcatttataatattttcatccaaatttgcttcatttgaatgttttccaaatctaagtctaagtctcttgaagttttttgagagattagctgagatattattgaattgaggatcattaaaatcaaatcctaattctttagatgatattttttccttatatgaaggtaaatgtttcattatctgaattactttatttgttttccagcaaactctttgcatatatgcattataatccattgatgggtttttggtatccagaatctcattggtgaaaatgtatttatataattgtttattttcaataatgtaatcaggaattgatggtattcttttgtaaaaattatctttattaattatattattattagaatttgaattgatatctgataatgtacatactaccggtctatgtgttgtaaacgggagcttttgatgtactctatatttaaaattgatatttcttagcagattgaaggaaacatggaaacggtctagccgattatttgttccatttgaaccgtggttggtgtaacatatacttcttctattatttggaaggaagaaaatatcatataaattattttccattaattgttgatgaagaaatgattcaatacgatttaaatttgttgcttccataggatgtgtattccaatcaccacaaatgattagattattttcaccacgagataatgatgataaagttggacataatgtgtcaataaaatcttttttgttaatgcagtggaatctgttatcattaacattattgtaaactggtacataaacagagatgatagttaagttttcttgtttgaaatttattgttatatcacagacataaaagtttgcaagttgattatcacgattatgccttggaaaaatattatttgaaatgatttctattgaagaatggtaaataattgctgttcgatgttgaacagattgaatcgcaattttgaaatcgaaattggataataattgttgaattgaagataattcagttgattgatttagatcaaattctgtaagacacataatttgaatttttttattttttgcataatttagaatatgaattaatttagaaggactagttgccttctgaatattaaaatttaaaatttttaacttattcattatgatattttatattttttttttaatttttatatttttatattttattaaacttgaagaattaaatgaattagacttgtgagtctaaatccatttgagatttctttttttcaagtttctcttttctttctaatgccatttctatttttttagcatctaataatgtaccagttgctacactcttaccttgtttagaagatttaactaatgttctgacatttctaggttgagttggagtttttggcatacttcttgtagtttcggcatgcttagtttcaacaaccatatcttctatctcttcatcactatggatgttttcatcttcatttggaatttctggatcatccacattttccaatacttggaaaggattgaccgcattatcaacgttactgactattgatgatgatgaatctgacctagataagttcttaggtttagatggaatagagaagccatctgaatctactttgtcattattaataacaacagctgcatctagatttaaaatgtttgtagaggtttgggctctacttcttttcccattaccatttgtagttgatgttcttggagtaacaggagcgtaaaatacttgatcattaaccgttgcgtttctaattctcaatgcccacattggtaatgatcttgagagagtttttttgaagaaattctctcttgtttttgggtggagggaattaaataacctttcttgttcagcctccgatgattttggacagaaaatttctctgtgaccattctttggaatttcaccttctttgaccttatgtctagggttgtaacatcttctacaacttggtttcattggacatctagctgtagtgtggtctgtacatctgcagtatacacaatgtgtaggtgcagtagacaagtaagtgatgatggggattttatgtgtttttccacctgttgtgtgtgagatggaatgaattttaggtggtaaaactgatgattttagttttaacactgtgtaaataattttattttgttcgtagaacttcatattgaatgccattttggattctttttcttgtggtaattgacaagacataatttctccgtattctgaatagagatttttaataatttcatcatatttagatttaatgatgaaaggagggaactccgtttttaaaacaacaagtgtgttgttttcttcaaaagattgatccattaagttaagatcatatgaattaaatgtttctactaacatggtagaaactaattgtaataattccatcggtggttcagccaatggtaggttaatttttaaactgtatttatcagtattaaacatgtttgcgccttcttccattgtattctcagttggtgcatcaattggtttgctcatattattatgaactttgttgatttttttatttttaatagtattattgttgttgttatctttgcttttgtgataatcttcaaagataaattgaaactctttgtgcatttctgctaaatttgtagtattaatatttctttctaattcttttaagaaagaggataaaatttcttgtaatttttcaaggtctaaaaattgatctttgccaacttttagaaagtatgaaaggtgataaagatgatctttatcaaccgtaatatttgcctccgtaattgttttatggagtttttgagccaacgtcatggttggttgaggttctgcatttacctcttggactacttcatcttcctcagcgcaatcttgaaattcaatatcttcatcttcgtcttgagtttcatggtcagtttggttcaaaccttcgttttctttttcttcagcaaagactgaaggtaacttgttgaactcaccatggggtaagttgggcggtttagtaacgttttgagggtcgggaggacctgaatcgtcgattgtagtagcttttagggcccctttttcaatcatttttttttattttatttttattttatttttattttttatttttattttatttttattttttattttattttattttatttttatttttattttttgattatgagggtttaccctttcttaaaaaggaaaatttcctaaaagagtttagtaattacaatttggcctatttgactgtatgattatttcagttttaataaccttttttcgatttaaattaatctattattttttcaatttatctttactaatttacagtattctttatatcgaattttattaacagtaattacttataacttttttttttcttactatagtaacaatattatacaattttttaattgaattacaaccgcttatcataaaaagaaagtattttatctaactttaaaattgtgtttgaggtgtttaaccatagtttgattttaaagcatcataacgaattaatttctgaagctaagttacgcaaaaatattgaagtgtttctgctattattatcatgtatctgtagtccttccaaactcgaatcagcccaattaaaaagggttgaaatttgattcgtttcagttgtattttctaaattgccatcatcttgtgtaacatcttcggaatctaaatacatactagggtcaacgttgtgtatatcttcaatatcaattgttgtgaattctttgtattcatctaaaatcgtttgaattactaatttgacaagtatttttggtaagcaatagcatctacctgatctcagtaactctctgtaaacttttctttttctcttaatagtagggaaaaattcatatttgagcaataatgatactgtcatacatagcatataataaaatttagaattacttatacgtttgaatacactattcagcaactttcctgtgaaaatcttgttgttagaaaagataaagtggtatgaagaatgagatggtatccataatcttaattcgatgttagtattggtggtttctaattcaacaaacaatagatgtacttacggttgctccatttctgtctttgaaaagaaaaggttagaaatagtaaagagttatagaataaattattaaaaacaacaacatgcttgaattgtaaaaataaatgttacgtaagaattaaaaacttgacagattatttaacgttgacacacactgttggacaactttattaacttgcatgttcaatagtaaggcctgcaaagtatataatttaacgactatttaaattacaaagatcattaattacacaacatattcaacacattacattattactcggcagcaaatctgaaaacgtttctgaaatctggatgtttatcagcaataatattgtcatactcttcaaaaacatgaataccaaacagttcaacactattgttcagctccatccattcaaaatcaagatcggaatctctcattctagaatataatgcaaattctaaattcccagaataagttttcatccaatcatgttcaatattcacttttttgaacttcataagtaacttataacgatcatgaagttcaactttaacaagcctttcaacttttacatattgccaattgttatccaccctgaattttgcataaccagttacacctttattactaatatgagtattacgggaatggatatgtttttgttctctgattatcaaactttctccttctgttatttcaccttgagcatacaatcttgaaagagcaccttccatgtcagcatcgggttgagcttttgctgtttttgatgtcgaataacaactcatatggtcatacttatattcagttatgtttttgcaaatgtcaatggttaaaaaagtcaactgattttgtgtagttttataactatttttatgagggctcacccttctcctaattgtgcaacaacatctttctgtatgaaaacaccaattatccctaaaagacccaaactctttccacaagtcgaataaatgaaggatttgatgagaaggtacatgaaaatatttttcgaagatcggtttatattcaggaatttgaaataatctttctaatttcaaagtcaatttcaaaaaacttcttctcatctcattcctattattattatcaacaaattcaattggaacatcagtggcaatcaaagcaacagcatatgcattcatttcaatcatacatttaaccaaaaattgataaggagttaacggattcacatttttaatgtcttcagcaatcggtaagaaatataacggaaaaatatgtgtaaaagctttaacatcaatcgctttaactctactcttggtcataagtgaatctaaacaaaggggtatatccctaatctcttcaaatagatgaacttttaccaaatattcatctaggttttttttatgttgaagaattaaattatgtgatgctatatccagacgtttaaaaaccattgaaacaaaaatgctcaccactcttttagtaatgtaattctcataaatagtatgcatcaaatctggacaaacaattttgaaataatcatcaagattaagttgtgaaactaaagattttgcctttactctccaatctgttgtaacatttccagccaaagtttcttccaaacatgatttatacatttcagttgtaacttttatatctttaaagacattttcagcatcatccacatctatttcttcaatttcgtcaaaaaaagtgtatgtaacatcgttattttcattgttagtattaccatcattaccattattactaccttcttcttcaagtctgttacgacgcatttctttagtcaaaggtgtaagaaaaatttgtttttctgatttatgaattgtgcaaaaagaacatggatgatttgatctaggaggtaatgtttccaatacattattcaatgccttcatatcagcagacatcgataataaatttatttttatagtaatttcctgaccattttcaataaaactaaaacctttttctgaaagaagatttaattcttcggagagagccttgcaagtaataccagtatatccaggtgaatcactttttgttaataaaacttctggcatatgaataaaattatttttatatcttaacatttctggcaaatccataaacatgacacaaaaaactttgattcctttataagtcttcacttgaatattacaatcatcactcgaaacatggatgttaaaagtaaactcatttggattgttactgcttacttcaaaaaacctacgcattttatcagattgataaacagtaccaattgcattagtattcctagaatatttctctctctcatcttccatatgttttctgatatctttattttggtaaagcgaataaagaacaggaacgattgactgatatctaaatgattctgcatcacatcttttatgaacttcgttcccaagagtatgctcttgaaggtctttattttcaaaaaaatagagacacagtgaacagtgacaaaattcaatatccttacatgtacctactttgctccattctttcaaaactctttcattgagacgtcttatttctaaatctttagggtgaattaaaccaaaagaatgcatgaatctcaaaataatgttagctttattcatagaaatgtagtgatgagaagacatccaataaacaagaaaagcacaatcagtatgaaagattctcttgaaattatttgccatgaacgcatcaaattgttctgcattgaaatgtggtttttgatattcccaagaattctcatctactggctcctgttctataatatttggatcattttctgttggaacatcttgattaggtcccccctcatcgtcactactgtttccaaaataatcagattcattagaaccacccatattatcaggcattaaatctgaagcatcactaaaaaaaccattattattatcatcatcatcatcattatcaccttcgttaccactatcttcagaagaacttgaatttccggagttaaacccatttgaaggtaacacattattaacctgagtatcaatttgattatcaatataagcatcaaaaattggtaattcatctacggacattaaaacaggagcatcagaatgaatattactagcattagcatcgttggtaatagagaattcacctacaggaggagattcataagcatcagaaagaacattatcatcatcaatattattggaaattgaaagattatctaccgacatttcagatgaagtattttcagaggtagcaccctcaaaatcatcattagttaaaacgtaatcagattcgtatctgtcacaattgtttatttcaataaatggtgaatctattataccattgtaatcccagcctttttcattaaaaaaacggttaaaaatgtcattcaatgtatctgcaatatcttgatctctcttcgtatttaacttcatgaaattaaatgatgattctttaattttttccaaatcatcaaatttaagtcttcttcttgcagcagctttaagtgtggttaaaaacccaagattcaaaccgtatagatttaagagtcccagtaaagaacctctattggttagttttgcatttttgaattttttaaaaatgtactttgcttttcttttattaacttttctagacccatatttattctcaagagtctcaatatcatcattgatattattttgaataaaattatcaatatcggcattaaattgaacatcactagacttctcttgccctgatctctcgttatagtaataattaaaattcaaagttgtacctgctgcaaaacgctttaaccttttttcactcaaaggttcccttttgtgttcctgataagatttgataattttgtaaagaatattttgcacgtttttaatagtgaaagaagatacagatgttatgtctgtttccagtattgatggtactttttccctcaaaaaagagagaaatagaagtgtatcgtctgtgtaactcattagagttgctatgactcaactataatattttagtagttcaagaaaaacgtgaaataaacaagccagataactttgcattctttacaaatttataattaatacgccaaaatgcagtattacttttaattaacacgcgtaaaacatgtttttgcttacataatctttacaatctccaaaaaacttgacttaacgccgcaaaatttggtgttcattacgtaataacattgacaactcactcacagcactctggatattacgtaataaagcatcaagattacgtaataaaattcaaaatttggagttagatgattggttagaatctcctagtttcagggagcccaaatataccggtgagacccttcaaaacttacacattgtcgaaatacaaagggaaacatacgatttttagccccaaaatcgaacaaatttgaattataatggttacagccgcaccaaaatgcgggttttgaaaattttactatgtaaaaaagttacaaaatttcccacggtgtatataattttgatggtacaataatctaaaaaaattattaaaacacaacctagctgattatttatcatttactatagaaatgtaaaaatatacaacttccaagttctggattcaaatgttatacaaatcaaacctattatagtccttttttttttcaaggttacaaagtataattttataataaaattatttaacaaaaaataacaggcaattacagaaaattgatgtagtattcctttgagaattttggtagttgatctgattatgacataataataaactttacaacgcaagaaaacccgcttatttaaaaatattaatgctaaattatcgtcgttaggaattcttcattgaattgtaataatatttctcggaacttttgaaattcctggaaatctttcaaatctgacatgaaaagaaactttaaattttgtgagaaatttaagttttttgctttgcaaattaagttatatggtcgtatatacagttcaagattcagctttcaatttcaaatttataccttcaaaaccttagttacatatagacaagcatacacctgctgtttttgttttaatcctgtattactgtaaattattaatgtatagtattttgcatatgtgtcatgataaaaataataatagatttaaataataataaataaatggggcagcttgagtatcatacgagtaaaacgttaacccctgataattgatgaaactgtcaataattatgaactctctggattttggggccaagaaaaaaagacttgtactgcctcggcaaaaaaataatttttagtgataattaaggttgtaagtatgataataaagctaaaaagatttttcttaaggcatcgattcaataattttcggtttcattgtgcaaatattcttgccaaattctccaacttattaatggagttgaaaataatattagccataaaggtttttctatttaaataataaagcttcaataaaataactgtaaagacagaccactttctaggaacgttcccgttttccccttaacggacagaataaacattttatgatggaacacatattaaaatatgtattttaaataaataattagattcttcttgaagactgtccctgatattatgatttattggaaatatgtaaactatacaaaagtctcttgtttaataaaagttcaatgtagtattcattaccaataatttaggataattcaggttgcatattaccgaacaaagtgcggacataaataatttattttaggaaaaaatagatctgtaactaaagggcttccccaggctcaggatatacacgtttttatttgcattaatttattattccaacggttattttttacaaagaaatattattttttgaatcgagatacaccatttttttagttgattattatttaatgctctttaccgagatttcatattttgtatacaatttaaaccttaacaataattcctaatatctacttttcgagctcaaatattcaagaacacggttttacaaaaggtttccatcattatttacatttttgagttgaaagtttacaattcgtataattaaagacagctttaatcatgggctttttgccgaatattacgttgtagttgaaaagattttatgaccatcaccttgaatatcttgaagatatcatatgtataaatagaaccaattccttcttaaacttacagtggtttagaaatagttttttattataaaacttattatttttttataattcttcttaccaaaagcaagtttgtcactcactatgttttccaactttgcctttagtgcagctatattactgtcactttttcaaacaatttcagcccaacgtaacgtttggtctactactgccaacgggcttggtgcttcaatccaattaaaagatactgctgcaacagaaacaggttttaatgcaaaattctacagttatcctgctcttgacttcattccattttggaatgatgattttgttgctgatggttattcaactagacaaattattactagtgccaatggtattactgatccaaactttagttttgattccaatatgtttaacgagcaagtttatggtttatacaatattgatatgttcaatgttttgattgaattaaaaggttattttaaacgtatgtattagtttcaatttttttttgattctttattctatccaaactttctgatcaatatactaacatttttcaatttcttatagctaaaaattctggtattcatagagtttccgttaactatctaaatgatggtggtttcatttggattggtgatggtgcttttgactcttgtactcaaaccggtatggattcaacttattctgatgttttattaggtgtcagagataatggtgctcattcttcttttgtttatcttgaagcggataattactatccaattagagttgtatatgttaatgttcaaaatgcagctgttatggaatttcaagttattgatccaacaggttatgtctttgatacttttgaaaatgttgtcaattttgacaaatctaatattcaagcttgtgctactgttagaggcgacaattcaatttctgtttcaacttcagtttcatttggcgcatcaactgcatcgaccgaatttgccgaagttgtccagaatgttccaggtggtcaatcaacctattttgttgaaaacttatatcttccagatcctacatcaactagatctaccacaatcactggtgaaaaatcaactcaatatacgactacagaattggttactgttgacaacaacgttgttccagttgagttatttgttaatcaagttacaggctcaacctctacaactattaattcagagactgatatatcgactacctctgctacaccatttgaaaatcatgttactggtaagtcaagtgcaactggatgcttgttggatattgcgcatttatcaactacaaatggttttcatgcaactttttatgattatcaagcttttaatttatacgatagccaatattttgcaaacagttacacccaacaaagagttattggtacagcacattacattactgatccaaactattctattggtgctggtttccaaacaatttatgatgatgttaagattgatgcaggtttaggttatgtcaaccaattaactggttacttttatgcacaagaagatggtatttacgcttttacaattaagaatgttaacgacggtgcaatggtttggtttggtaacgatgatgcattttcttgctgtcaaccagatgtcattccgtacaattctgaaaatggtgctcttatctatactgtcggtactgatgtcacagcatttgttcatttcgaagctggaaagtattatccaatgagagttgttttagtgaacatccttcttggatcaactcttgatatttctgttattacaccatccggtactattttggacgaagattggtcaacttggatttattccattagcgatgttgaagatactcaatgtccatatattgccattgatagctcctcaacgactaacaccaacaccaacacttctaacaccaacaccaacactactagtactgataccaacaccaatacttctagtactgataccaacaccaatacttctaacaccaacaccaacaccaacaccaacaccaacaccaacaccaacaccaacaccaacaccaacacttctaacaccaacaccaacaccaatacttctagtactgataccaacaccaatacttctagtactgataccaacaccaatacttctaacaccaacaccaacaccaatacttctagtactgataccaacaccaatacttctaacaccaacaccaacaccaacaccaacaccaacaccaatactactagtactgataccaacaccaacaccaacaccaacaccaacaccaacaccaacaccaacaccaacaccaacacttctaacaccaacaccaacaccaatacttctagtactgataccaacaccaatacttctagtactgataccaacaccaatacttctaacaccaacaccaacaccaatacttctagtactgataccaacaccaatacttctaacaccaacaccaacaccaacaccaacacttctaacaccaacaccaacaccaacaccaacacttctaacaccaacaccaacaccaacaccaacacttctaacaccaacacttctaacaccaacaccaacactactagtactaacaccaacaccaatactactagtactgataccaacaccaatacttctaacaccaacaccaacaccaacactactagtactaacaccaacaccaatacttctagtactgataccaacaccaatacttctaacaccaacaccaatacttctagt
